(19) United States
(12) Patent Application Publication
(10) Pub. No.: US 2024/0342269 A1
(43) Pub. Date: Oct. 17, 2024

(54) OPTIMIZED NUCLEOTIDE SEQUENCES ENCODING SARS-COV-2 ANTIGENS

(71) Applicant: TRANSLATE BIO, INC., Waltham, MA (US)

(72) Inventors: Anusha DIAS, Lexington, MA (US); Khang Anh TRAN, Lexington, MA (US); Minnie ZACHARIA, Lexington, MA (US); Xiaobo GU, Lexington, MA (US); Lianne BOEGLIN, Lexington, MA (US); Joseph A. SKALESKI, Lexington, MA (US); Shrirang KARVE, Lexington, MA (US); Frank DEROSA, Lexington, MA (US); Tong-Ming FU, Lexington, MA (US); Kirill KALNIN, Lexington, MA (US); Sudha CHIVUKULA, Lexington, MA (US); Timothy PLITNIK, Lexington, MA (US); Danilo CASIMIRO, Lexington, MA (US); Jeffrey S. DUBINS, Lexington, MA (US)

(21) Appl. No.: 17/923,497

(22) PCT Filed: May 7, 2021
(86) PCT No.: PCT/US2021/031256

§ 371 Date: May 7, 2024

Related U.S. Application Data
(60) Provisional application No. 63/021,319, filed on May 7, 2020.
(60) Provisional application No. 63/032,825, filed on Jun. 1, 2020.
(60) Provisional application No. 63/076,729, filed on Sep. 10, 2020.
(60) Provisional application No. 63/076,718, filed on Sep. 10, 2020.
(60) Provisional application No. 63/088,739, filed on Oct. 7, 2020.
(60) Provisional application No. 63/143,604, filed on Jan. 29, 2021.
(60) Provisional application No. 63/143,612, filed on Jan. 29, 2021.
(60) Provisional application No. 63/146,807, filed on Feb. 8, 2021.

(51) Int. Cl. A61K 39/215; A61K 9/51; A61K 39/00; A61P 31/14; C07K 14/005

(52) U.S. Cl. CPC A61K 39/215; A61K 9/5123; A61P 31/14; C07K 14/005; A61K 2039/53; C12N 2770/20022; C12N 2770/20034

(57) ABSTRACT

The present invention relates to optimized nucleotide sequence encoding SARS-COV-2 antigens. These sequences are particularly suitable for use in vaccine compositions for the treatment or prevention of infections caused by a β-coronaviruses, including COVID-19 infections, in a human or animal subject in need of such treatment.

### CROSS-REFERENCE TO RELATED APPLICATIONS

[0001] This application is a 35 U.S.C. § 371 National Stage Application of International Application No. PCT/US2021/031256, filed on May 7, 2021, which claims benefit of, and priority to U.S. Provisional Patent Application Ser. No. 63/021,319 filed on May 7, 2020, U.S. Provisional Patent Application Ser. No. 63/032,825 filed on Jun. 1, 2020, U.S. Provisional Patent Application Ser. No. 63/076,718 filed on Sep. 10, 2020, U.S. Provisional Patent Application Ser. No. 63/076,729 filed on Sep. 10, 2020, U.S. Provisional Patent Application Ser. No. 63/088,739 filed on Oct. 7, 2020, U.S. Provisional Patent Application Ser. No. 63/143,604 filed on Jan. 29, 2021, U.S. Provisional Patent Application Ser. No. 63/143,612 filed on Jan. 29, 2021, and U.S. Provisional Patent Application Ser. No. 63/146,807 filed on Feb. 8, 2021. The contents of each of the foregoing applications are hereby incorporated by reference in their entireties.

### SEQUENCE LISTING

[0002] The present specification makes reference to a Sequence Listing electronically filed in ASCII format. The sequence listing file named 122548. US044_ST25.txt, was created on Apr. 3, 2024, and is 811,008 bytes in size. The entire contents of the sequence listing are herein incorporated by reference in their entirety.

### FIELD OF THE INVENTION

[0003] The present invention relates to SARS-COV-2 antigenic polypeptides and to optimized nucleotide sequence encoding these SARS-COV-2 antigenic polypeptides. These antigenic polypeptides and optimized nucleotide sequences are particularly suitable for use in vaccine compositions for the treatment or prevention of infections caused by a β-coronaviruses, including COVID-19 infections, in a human or animal subject in need of such treatment.

### BACKGROUND OF THE INVENTION

[0004] The Coronavirus Disease 2019 (COVID-19) pandemic poses a serious threat to global public health. The causative agent of COVID-19 is severe acute respiratory syndrome coronavirus 2 (SARS-COV-2), a newly emerged human pathogen.

[0005] Protein antigen selection and design both contribute to the immunogenicity of a vaccine, whether it is protein-based or nucleic acid-based. Moreover, with respect to nucleic acid-based immunogenic compositions such as mRNA-based vaccines, expression levels achieved from the nucleic acid encoding one or more protein antigens can significantly impact efficacy.

[0006] Recombinant DNA technology and advances in nucleic acid sequencing and synthesis have made it possible to rapidly design protein antigens, once the genome sequence of a pathogen has been determined. Success or failure of a vaccine can depend on the selection of antigenic polypeptides that yield a highly effective response in form of neutralizing antibodies in vivo. Therefore a need exists to provide new antigenic polypeptides derived from SARS-COV-2 proteins for use in immunogenic compositions that provide prophylaxis against COVID-19.

[0007] Effective expression or production of a protein from an mRNA within a cell depends on a variety of factors. Optimization of the composition and order of codons within a protein-coding nucleotide sequence (“codon optimization”) can lead to higher expression of the mRNA-encoded protein. Various methods of performing codon optimization are known in the art, however, each has significant drawbacks and limitations from a computational and/or therapeutic point of view. In particular, known methods of codon optimization often involve, for each amino acid, replacing every codon with the codon having the highest usage for that amino acid, such that the “optimized” sequence contains only one codon encoding each amino acid.

[0008] Accordingly, a need exists for improved codon optimization methods that generate an optimized nucleotide sequence for increased expression of mRNA encoding a selected or designed protein antigen for the production of an efficacious mRNA vaccine.

[0009] Moreover, with the global spread of SARS-COV-2, new variants of the virus have emerged. Therefore, a need exists to provide pharmaceutical compositions (e.g., immunogenic compositions) that are capable of eliciting a broadly neutralizing antibody response effective against a multitude of naturally occurring variants of SARS-COV-2.

### SUMMARY OF THE INVENTION

[0010] The present invention addresses the need for selecting and/or designing a protein antigen that yields an effective immune response against SARS-COV-2. It also addressed the need for generating optimized nucleotide sequences encoding that protein antigen for the effective treatment or prevention of COVID-19 infections through the provision of a vaccine comprising a nucleic acid (e.g., an mRNA) with the optimized nucleotide sequence. Various selected and/or designed protein antigens against SARS-COV-2 are provided herein, as well as at least one optimized nucleotide sequence for each such protein antigen.

[0011] In addition, a method is provided for analyzing an amino acid sequence of a protein antigen to produce at least one optimized nucleotide sequence. The optimized nucleotide sequence for each selected and/or designed protein antigen is designed to increase the expression of that encoded protein antigen compared to the expression of the protein associated with a naturally occurring nucleotide sequence. Codon optimization produces a protein-coding nucleotide sequence based on various criteria without altering the sequence of translated amino acids of the encoded protein antigen, due to the redundancy in the genetic code. Moreover, the optimized nucleotide sequences disclosed here are designed to produce high-quality full-length transcripts during in vitro synthesis and therefore can be manufactured more cost effectively than optimized nucleotide sequences generated with prior art codon optimization algorithms. In particular, termination sequences and the like that could result in incomplete transcripts during in vitro synthesis are effectively removed by the sequence optimization processes described herein.

[0012] As demonstrated in the examples, immunogenic compositions that comprise a LNP-encapsulated optimized nucleotide sequence of the invention which encodes a full-length pre-fusion stabilized SARS-COV-2 S protein can produce an effective neutralizing antibody response and therefore can provide protective efficacy against COVID-19 infection.

[0013] The present invention also addresses the need for immunogenic compositions that are capable of eliciting a broadly effective immune response, in particular in the form of neutralizing antibodies, against naturally occurring variants of SARS-COV-2. As shown in the examples, the inventors surprisingly discovered that administration of an immunogenic composition that comprises a LNP-encapsulated optimized nucleotide sequence which encodes a South African variant of the SARS-COV-2 S protein to subjects who have been previously immunized with a COVID-19 vaccine can induce an effective neutralizing antibody response against a broad range of β-coronaviruses, including naturally occurring variants of SARS-COV-2 isolated in Wuhan, South Africa, Japan/Brazil and California, as well as the phylogenetically more distant SARS-CoV-1 strain.

[0014] In particular, the invention provides a nucleic acid comprising an optimized nucleotide sequence encoding a full-length SARS-COV-2 spike protein which has been modified relative to naturally occurring full-length SARS-COV-2 spike protein of SEQ ID NO: 1 to remove the furin cleavage site and to mutate residues 986 and 987 to proline, wherein the optimized nucleotide sequence consists of codons associated with a usage frequency which is greater than or equal to 10%; wherein the optimized nucleotide sequence: does not contain a termination signal having one of the following nucleotide sequences: 5′-X₁ATCTX₂TX₃-3′, wherein X₁, X₂ and X₃ are independently selected from A, C, T or G; and 5′-X₁AUCUX₂UX₃-3′, wherein X₁, X₂ and X₃ are independently selected from A, C, U or G; does not contain any negative cis-regulatory elements and negative repeat elements; and has a codon adaptation index greater than 0.8; wherein, when divided into non-overlapping 30 nucleotide-long portions, each portion of the optimized nucleotide sequence has a guanine cytosine content range of 30%-70%. In particular embodiments, the nucleic acid is mRNA. In some embodiments, the nucleic acid is DNA. In certain embodiments, the optimized nucleotide sequence does not contain a termination signal having one of the following sequences: TATCTGTT; TTTTTT; AAGCTT; GAAGAGC; TCTAGA; UAUCUGUU; UUUUUU; AAGCUU; GAAGAGC; UCUAGA.

[0015] In some embodiments, the optimized nucleotide sequence encodes the amino acid sequence of SEQ ID NO:11. In particular embodiments, the optimized nucleotide sequence is at least 85% (e.g., at least 90%) identical to the nucleic acid sequence of SEQ ID NO: 44 or SEQ ID NO: 148 and encodes the amino acid sequence of SEQ ID NO: 11. In specific embodiments, the optimized nucleotide sequence has the nucleic acid sequence of SEQ ID NO: 44 or SEQ ID NO: 148.

[0016] In some embodiments, the full-length SARS-COV-2 spike protein encoded by the optimized sequence further contains the L18F, D80A, D215G, L242-, A243-, L244-, K417N, E484K, N501Y, D614G and A701V mutations. In these embodiments, the optimized nucleotide sequence may encode the amino acid sequence of SEQ ID NO: 167. In particular embodiments, the optimized nucleotide is at least 85% (e.g., at least 90%) identical to the nucleic acid sequence of SEQ ID NO: 166 or SEQ ID NO: 173 and encodes the amino acid sequence of SEQ ID NO: 167. In specific embodiments, the optimized nucleotide sequence has the nucleic acid sequence of SEQ ID NO: 166 or SEQ ID NO: 173.

[0017] In certain embodiments, a nucleic acid of the invention is for use in therapy. For example, the invention also provides an immunogenic composition comprising a nucleic acid of the invention for use in the prophylaxis of an infection caused by a β-coronavirus. In addition, the invention also provides use of a nucleic acid of the invention in the manufacture of a medicament for the prophylaxis of an infection caused by a β-coronavirus. In certain embodiments, the β-coronavirus expresses a spike protein which binds to angiotensin-converting enzyme 2 (ACE2). In a specific embodiment, the β-coronavirus is SARS-COV-2. In other embodiments, the β-coronavirus has a spike protein that is at least 75%, 80%, 90%, 95% or 99% identical to SEQ ID NO: 1.

[0018] The invention further provides a method of treating or preventing an infection caused by a β-coronavirus, said method comprising administering to a subject an effective amount of an immunogenic composition comprising a nucleic acid of the invention. In certain embodiments, the β-coronavirus expresses a spike protein which binds to angiotensin-converting enzyme 2 (ACE2). In a specific embodiments, the β-coronavirus is SARS-COV-2. In other embodiments, the β-coronavirus has a spike protein that is at least 75%, 80%, 90%, 95% or 99% identical to SEQ ID NO: 1.

[0019] Furthermore, the invention provides a pharmaceutical composition comprising i) a nucleic acid of the invention and ii) a lipid nanoparticle. In certain embodiments, the nucleic acid is mRNA, which may be present at a concentration of between about 0.5 mg/mL to about 1.0 mg/mL. In certain embodiments, the nucleic acid of the invention (e.g., an mRNA in accordance with the invention) is encapsulated in the lipid nanoparticle. In certain embodiments, the lipid nanoparticle comprises a cationic lipid, a non-cationic lipid, a cholesterol-based lipid, and a PEG-modified lipid. In particular embodiments, the cationic lipid is selected from cKK-E12, cKK-E10, OF-Deg-Lin and OF-02; the non-cationic lipid is selected from DOPE and DEPE; the cholesterol-based lipid is cholesterol; and the PEG-modified lipid is DMG-PEG-2K. In certain embodiments, the cationic lipid constitutes about 30-60% of the lipid nanoparticle by molar ratio, e.g., about 35-40%. In certain embodiments, the ratio of cationic lipid to non-cationic lipid to cholesterol-based lipid to PEG-modified lipid is approximately 30-60:25-35:20-30:1-15 by molar ratio.

[0020] In certain embodiments, a lipid nanoparticle encapsulating a nucleic acid of the invention (e.g., an mRNA in accordance with the invention) comprises cKK-E12, DOPE, cholesterol and DMG-PEG2K; cKK-E10, DOPE, cholesterol and DMG-PEG2K; OF-Deg-Lin, DOPE, cholesterol and DMG-PEG2K; or OF-02, DOPE, cholesterol and DMG-PEG2K. In a specific embodiment, the lipid nanoparticle comprises cKK-E10, DOPE, cholesterol and DMG-PEG2K at the molar ratios 40:30:28.5:1.5. In certain embodiments, the lipid nanoparticle has an average size of less than 150 nm, e.g., less than 130 nm, less than 110 nm, less than 100 nm. In some embodiments, the lipid nanoparticle has an average size of about 90-110 nm, or has an average size of about 50-70 nm, e.g., about 55-65 nm.

[0021] In certain embodiments, a pharmaceutical composition of the invention is for use in treating or preventing an infection caused by a β-coronavirus. In certain embodiments, the β-coronavirus expresses a spike protein which binds to angiotensin-converting enzyme 2 (ACE2). In a specific embodiment, the β-coronavirus is SARS-COV-2. In other embodiments, the β-coronavirus has a spike protein that is at least 75%, 80%, 90%, 95% or 99% identical to SEQ ID NO: 1.

[0022] In certain embodiments, a pharmaceutical composition of the invention is administered intramuscularly. In certain embodiments, a pharmaceutical composition of the invention is administered at least once. In some embodiments, a pharmaceutical composition is administered at least twice. In particular embodiments, the period between administrations is at least 2 weeks, e.g. 3 weeks, or 1 month. In some embodiments, the period between administrations is about 3 weeks.

[0023] In one particular embodiment, the invention provides an mRNA construct (mRNA construct 1) consisting of the following structural elements:
[0024] a 5′ cap with the following structure:

[chemical structure]

[0025] a 5′ untranslated region (5′ UTR) having the nucleic acid sequence of SEQ ID NO: 144;
[0026] a protein coding region having the nucleic acid sequence of SEQ ID NO: 148;
[0027] a 3′ untranslated region (3′ UTR) having the nucleic acid sequence of SEQ ID NO: 145; and
[0028] a poly A tail.

[0029] In another particular embodiment, the invention provides an mRNA construct (mRNA construct 2) consisting of the following structural elements:
[0030] a 5′ cap with the following structure:

[chemical structure]

[0031] a 5′ untranslated region (5′ UTR) having the nucleic acid sequence of SEQ ID NO: 144;
[0032] a protein coding region having the nucleic acid sequence of SEQ ID NO: 173;
[0033] a 3′ untranslated region (3′ UTR) having the nucleic acid sequence of SEQ ID NO: 145; and
[0034] a poly A tail.

[0035] In specific embodiments, the invention provides a lipid nanoparticle encapsulating an mRNA construct of the invention. In some embodiments, the lipid nanoparticle encapsulates more than one mRNA construct of the invention, e.g. a lipid nanoparticle may encapsulate both mRNA construct 1 and mRNA construct 2. In certain embodiments, the lipid nanoparticle comprises a cationic lipid, a non-cationic lipid, a cholesterol-based lipid and a PEG-modified lipid. In certain embodiments, the cationic lipid is selected from cKK-E12, cKK-E10, OF-Deg-Lin and OF-02; the non-cationic lipid is selected from DOPE and DEPE; the cholesterol-based lipid is cholesterol; and the PEG-modified lipid is DMG-PEG-2K. In a specific embodiment, the lipid nanoparticle comprises cKK-E10, DOPE, cholesterol and DMG-PEG2K at the molar ratios 40:30:28.5:1.5.

[0036] The invention also provides an immunogenic composition comprising an mRNA construct of the invention, or a lipid nanoparticle encapsulating an mRNA construct of the invention. In some embodiments, the immunogenic composition comprises more than one mRNA constructs of the invention, e.g., mRNA construct 1 and mRNA construct 2. In some embodiments, the immunogenic composition comprises the more than one mRNA constructs (e.g., mRNA construct 1 and mRNA construct 2) encapsulated in the same lipid nanoparticle. In other embodiments, the more than one mRNA constructs e.g., mRNA construct 1 and mRNA construct 2) are encapsulated in separate lipid nanoparticles. In certain embodiments, the immunogenic composition comprises between 5 μg and 200 μg of the mRNA construct(s).

[0037] In certain embodiments, the immunogenic composition comprises between 7 μg and 135 μg of the mRNA construct(s). In certain embodiments, the immunogenic composition comprises at least 10 μg of the mRNA construct(s). In certain embodiments, the immunogenic composition comprises at least 15 μg of the mRNA construct(s). In certain embodiments, the immunogenic composition comprises at least 20 μg of the mRNA construct(s). In certain embodiments, the immunogenic composition comprises at least 25 μg of the mRNA construct(s). In certain embodiments, the immunogenic composition comprises at least 35 μg of the mRNA construct(s). In certain embodiments, the immunogenic composition comprises at least 40 μg of the mRNA construct(s). In certain embodiments, the immunogenic composition comprises at least 45 μg of the mRNA construct(s). In certain embodiments, the immunogenic composition comprises 7.5 μg, 15 μg, 45 μg or 135 μg of the mRNA construct(s). Typically, reference to a certain μg amount of mRNA refers to the total dose of mRNA in the immunogenic composition. In certain embodiments, an immunogenic composition comprising an mRNA

[0038] construct of the invention, or a lipid nanoparticle encapsulating an mRNA construct of the invention, is for use in treating or preventing an infection caused by a β-coronavirus. In certain embodiments, the β-coronavirus expresses a spike protein which binds to angiotensin-converting enzyme 2 (ACE2). In a specific embodiment, the β-coronavirus is SARS-COV-2. In other embodiments, the β-coronavirus has a spike protein that is at least 75%, 80%, 90%, 95% or 99% identical to SEQ ID NO: 1.

[0039] The invention also provides a method of treating or preventing an infection caused by a β-coronavirus, said method comprising administering to a subject an effective amount of an immunogenic composition comprising an mRNA construct of the invention, or a lipid nanoparticle encapsulating an mRNA construct of the invention. In certain embodiments, the β-coronavirus expresses a spike protein which binds to angiotensin-converting enzyme 2 (ACE2). In a specific embodiment, the β-coronavirus is SARS-COV-2. In other embodiments, the β-coronavirus has a spike protein that is at least 75%, 80%, 90%, 95% or 99% identical to SEQ ID NO: 1. In particular embodiments, the immunogenic composition is administered to the subject at least twice. In certain embodiments, the period between administrations is at least 2 weeks. In some embodiments, the period between administrations is about 3 weeks.

[0040] In a particular embodiment, the invention provides an immunogenic composition comprising at least two nucleic acids, wherein the first nucleic acid comprises an optimized nucleotide sequence encoding a full-length SARS-COV-2 spike protein which has been modified relative to naturally occurring full-length SARS-COV-2 spike protein of SEQ ID NO: 1 to remove the furin cleavage site and to mutate residues 986 and 987 to proline; and the second nucleic acid comprises an optimized nucleotide sequence encoding a full-length SARS-COV-2 spike protein which has been modified relative to naturally occurring full-length SARS-COV-2 spike protein of SEQ ID NO: 1 to remove the furin cleavage site and to mutate residues 986 and 987 to proline and further contains the L18F, D80A, D215G, L242-, A243-, L244-, K417N, E484K, N501Y, D614G and A701V mutations.

[0041] In some embodiments, the first nucleic acid comprises an optimized nucleotide sequence which encodes the amino acid sequence of SEQ ID NO: 11. In particular embodiments, the first nucleic acid comprises an optimized nucleotide sequence that is at least 85% (e.g., at least 90%) identical to the nucleic acid sequence of SEQ ID NO: 44 or SEQ ID NO: 148 and encodes the amino acid sequence of SEQ ID NO: 11. In specific embodiments, the optimized nucleotide sequence has the nucleic acid sequence of SEQ ID NO: 44 or SEQ ID NO: 148.

[0042] In some embodiments, the second nucleic acid comprises an optimized nucleotide sequence which encodes the amino acid sequence of SEQ ID NO: 167. In particular embodiments, the second nucleic acid comprises an optimized nucleotide sequence that is at least 85% (e.g., at least 90%) identical to the nucleic acid sequence of SEQ ID NO: 168 or SEQ ID NO: 173 and encodes the amino acid sequence of SEQ ID NO: 167. In specific embodiments, the optimized nucleotide sequence has the nucleic acid sequence of SEQ ID NO: 166 or SEQ ID NO: 169.

[0043] In certain embodiments, the at least two nucleic acids are mRNA constructs. In specific embodiments, the optimized nucleotide sequence of the first nucleic acid has the nucleic acid sequence of SEQ ID NO: 148, and the optimized nucleotide sequence of the second nucleic acid has the nucleic acid sequence of SEQ ID NO: 173. In particular embodiments, the first nucleic acid is mRNA construct 1, and the second nucleic acid is mRNA construct 2. In certain embodiments, the at least two nucleic acids are encapsulated in lipid nanoparticles. In certain embodiments, the at least two nucleic acids are encapsulated in the same lipid nanoparticle. In certain embodiments, the at least two nucleic acids are encapsulated in separate lipid nanoparticles.

[0044] In some embodiments, the lipid nanoparticle comprises a cationic lipid, a non-cationic lipid, a cholesterol-based lipid and a PEG-modified lipid. In certain embodiments, the cationic lipid is selected from cKK-E12, cKK-E10, OF-Deg-Lin and OF-02; the non-cationic lipid is selected from DOPE and DEPE; the cholesterol-based lipid is cholesterol; and the PEG-modified lipid is DMG-PEG-2K. In specific embodiments, the lipid nanoparticle comprises cKK-E10, DOPE, cholesterol and DMG-PEG2K at the molar ratios 40:30:28.5:1.5. In further specific embodiments, the immunogenic composition comprises a total of 7.5 μg, 15 μg, 45 μg or 135 μg of the at least two nucleic acids.

[0045] The immunogenic composition described in paragraphs [0030]-[0034] can be used in the prophylaxis of an infection caused by a β-coronavirus. In certain embodiments, the β-coronavirus expresses a spike protein which binds to angiotensin-converting enzyme 2 (ACE2). In a specific embodiment, the β-coronavirus is SARS-COV-2. In other embodiments, the β-coronavirus has a spike protein that is at least 75% (e.g., at least 80%, 90%, 95% or 99%) identical to SEQ ID NO: 1.

[0046] In certain embodiments, the subject has not previously been administered an immunogenic composition for the prophylaxis of an infection caused by a β-coronavirus (e.g., SARS-COV-2), i.e., the immunogenic composition described in paragraphs [0030]-[0034] is the first immunogenic composition which is administered to the subject for that purpose. More commonly, the subject has previously been administered with one or more immunogenic composition(s) for the prophylaxis of an infection caused by a β-coronavirus (e.g., SARS-COV-2). For clarity “the subject has previously been administered with one or more immunogenic composition(s)” means that the subject has previously been administered with one or more doses of the same immunogenic composition or with one or more doses of different immunogenic composition(s)”. For example, the subject may have previously been administered with two immunogenic compositions at least two weeks apart for the prophylaxis of an infection caused by a β-coronavirus (e.g., SARS-COV-2). In some embodiments, these one or more immunogenic composition(s) is/are different from the immunogenic composition described in paragraphs [0030]-[0034]. In specific embodiments, the one or more immunogenic composition(s) is/are selected from a pharmaceutical compositions disclosed herein (e.g., an immunogenic composition or a vaccine disclosed herein) and a COVID-19 vaccine produced by Moderna (COVID-19 Vaccine Moderna, such as for example, mRNA-1273 or mRNA-1283), CureVac (CVnCOV), Johnson & Johnson (COVID-19 Vaccine Janssen), AstraZeneca (Vaxzevria), Pfizer/BioNTech (Comirnaty), Sputnik (Gam-COVID-Vac), Sinovac (COVID-19 Vaccine (Vero Cell) Inactivated) or Novavax (NVX-CoV2373). In certain embodiments, the immunogenic composition described in paragraphs [0030]-[0034] is administered 3-18 months after administration of the one or more immunogenic composition(s), which were previously administered to the subject for the prophylaxis of an infection caused by a β-coronavirus (e.g., SARS-COV-2). In certain embodiments, the immunogenic composition described in paragraphs [0030]-[0034] is administered at least 9 months or at least 12 months after administration of the one or more immunogenic composition(s), which were previously administered to the subject for the prophylaxis of an infection caused by a β-coronavirus (e.g., SARS-COV-2). In certain embodiments, the immunogenic composition described in paragraphs [0030]-[0034] is administered at least once, e.g., at least twice.

[0047] In another particular embodiment, the invention provides a method of treating or preventing an infection caused by a β-coronavirus, said method comprising administering to a subject an effective amount of an immunogenic composition comprising an mRNA construct, wherein said mRNA construct comprises an optimized nucleotide sequence encoding a full-length SARS-COV-2 spike protein which has been modified relative to naturally occurring full-length SARS-COV-2 spike protein of SEQ ID NO: 1 to remove the furin cleavage site and to mutate residues 986 and 987 to proline and further contains the L18F, D80A, D215G, L242-, A243-, L244-, K417N, E484K, N501Y, D614G and A701V mutations. In some embodiments, the optimized nucleotide sequence encodes the amino acid sequence of SEQ ID NO: 167. In particular embodiments, the optimized nucleotide sequence comprises a nucleotide sequence that is at least 85% (e.g., at least 90%) identical to the nucleic acid sequence of SEQ ID NO: 166 or SEQ ID NO: 173 and encodes the amino acid sequence of SEQ ID NO: 167. In a specific embodiment, the optimized nucleotide sequence has the nucleic acid sequence of SEQ ID NO: 173. In certain embodiments, the mRNA construct is mRNA construct 2. In certain embodiments, the mRNA construct is encapsulated in a lipid nanoparticle. In certain embodiments, the lipid nanoparticle comprises a cationic lipid, a non-cationic lipid, a cholesterol-based lipid and a PEG-modified lipid. In certain embodiments, the cationic lipid is selected from cKK-E12, cKK-E10, OF-Deg-Lin and OF-02; the non-cationic lipid is selected from DOPE and DEPE; the cholesterol-based lipid is cholesterol; and the PEG-modified lipid is DMG-PEG-2K. In specific embodiments, the lipid nanoparticle comprises cKK-E10, DOPE, cholesterol and DMG-PEG2K at the molar ratios 40:30:28.5:1.5. In certain embodiments, the immunogenic composition comprises 7.5 μg, 15 μg, 45 μg or 135 μg of the mRNA construct. In certain embodiments, the β-coronavirus expresses a spike protein which binds to angiotensin-converting enzyme 2 (ACE2). In a specific embodiment, the β-coronavirus is SARS-COV-2. In other embodiments, the β-coronavirus has a spike protein that is at least 75%, 80%, 90%, 95% or 99% identical to SEQ ID NO:1.

[0048] In the method described in paragraph [0037], the subject may have not previously been administered an immunogenic composition for the prophylaxis of an infection caused by a β-coronavirus (e.g., SARS-COV-2). More commonly, the subject has previously been administered with one or more immunogenic composition(s) for the prophylaxis of an infection caused by a β-coronavirus (e.g., SARS-COV-2), e.g., two immunogenic compositions at least two weeks apart. In certain embodiments, the one or more immunogenic composition(s) is/are different from the immunogenic compositions of the invention. In certain embodiments, the one or more immunogenic composition(s) which has/have previously been administered to the subject is/are selected from a pharmaceutical compositions disclosed herein (e.g., an immunogenic composition or a vaccine disclosed herein) and a COVID-19 vaccine produced by Moderna (COVID-19 Vaccine Moderna, such as for example, mRNA-1273 or mRNA-1283), CureVac (CVnCOV), Johnson & Johnson (COVID-19 Vaccine Janssen), AstraZeneca (Vaxzevria), Pfizer/BioNTech (Comirnaty), Sputnik (Gam-COVID-Vac), Sinovac (COVID-19 Vaccine (Vero Cell) Inactivated) or Novavax (NVX-CoV2373). In certain embodiments, the method described in paragraph comprises administering the immunogenic composition described in that paragraph about 3-18 months after administration of the one or more immunogenic composition(s) which has/have previously been administered to the subject. In certain embodiments, the method described in paragraph comprises administering the immunogenic composition described in that paragraph [0037] at least 9 months or at least 12 months after administration of the one or more immunogenic composition(s). In certain embodiments, the method described in paragraph comprises administering the immunogenic composition described in that paragraph at least once, e.g., at least twice.

### BRIEF DESCRIPTION OF THE DRAWINGS

[0049] FIGS. 1A and 1B illustrate a process for generating optimized nucleotide sequences in accordance with the invention. As illustrated in FIG. 1A, the process receives an amino acid sequence of interest and a first codon usage table which reflects the frequency of each codon in a given organism (e.g., a mammal or human). The process then removes codons from the first codon usage table if they are associated with a codon usage frequency which is less than a threshold frequency (e.g., 10%). The codon usage frequencies of the codons not removed in the first step are normalized to generate a normalized codon usage table. The process uses the normalized codon usage table to generate a list of optimized nucleotide sequences. Each of the optimized nucleotide sequences encode the amino acid sequence of interest. As illustrated in FIG. 1B, the list of optimized nucleotide sequences is further processed by applying a motif screen filter, guanine-cytosine (GC) content analysis filter, and codon adaptation index (CAI) analysis filter, in that order, to generate an updated list of optimized nucleotide sequences.

[0050] FIG. 2 illustrates an example bar chart depicting the yield of protein produced from various codon optimized nucleotide sequences, determined by an ELISA assay for EPO.

[0051] FIG. 3 illustrates the structure of the spike protein of SARS-COV-2. SS=signal sequence; NTD=N-terminal domain; RBD=receptor binding domain; FP=fusion peptide; HR1=heptad repeat-N; CH, central helix; CTD, connector domain; HR2, heptad repeat 2; TM, transmembrane domain; CT, cytoplasmic tail. S2′, S2′ protease cleavage site are denoted with arrows. The PP and GSAS mutations lead to a prefusion conformations of the spike protein. This image is based FIG. 1 in Wrapp et al (2020) Science 367, 6483, 1260-1263.

[0052] FIG. 4 illustrates the spike protein of SARS-COV-2 and variants thereof that may form part of the pharmaceutical compositions disclosed herein or may be encoded by the optimized nucleotides sequences disclosed herein, e.g., for use in the nucleic acid-based vaccines disclosed here. Domains and subunits, mutations to remove the furin cleavage site and replace residues 985, 986 and 987 with proline (P, PP, PPP and GSAS mutations) and the relevant SEQ ID NOs are indicated. The same abbreviations are used as in FIG. 3.

[0053] FIGS. 5-7 demonstrate the protein production of nucleic acid vector constructs expressing optimized nucleic sequences encoding a full length native SARS-COV-2 S protein (Construct A) and three stable prefusion conformations of a SARS-COV-2 S protein (Constructs B-D). Construct B encodes a variant SARS-COV-2 S protein that is modified relative to naturally occurring SARS-COV-2 spike protein to lack the furin cleavage site (and therefore is not cleaved to form the S1 and S2 subunits) and to contain prolines as residues 986 and 987 (thereby stabilizing the protein in its prefusion conformation). Construct C encodes a variant SARS-COV-2 S protein that is modified relative to naturally occurring SARS-COV-2 spike protein to contain prolines as residues 986 and 987 and Construct D encodes a variant SARS-COV-2 S protein that is modified relative to naturally occurring SARS-COV-2 spike protein to lack the furin cleavage site.

[0054] FIGS. 5-6 show that constructs A and B can produce a glycosylated mature protein (˜225 kDa band) and a pre-processed full length S protein (˜170-180 kDa band).

[0055] FIG. 5 also shows the presence of S1 and S2 subunit bands with Construct A, demonstrating that the native full length SARS-COV-2 S protein is processed correctly by the cells.

[0056] FIG. 7 demonstrates that all four constructs were able to produce full length S protein. S1 and S2 subunit bands were detected with Construct A and Construct C. Strong bands of fully glycosylated mature S protein were detected with Construct B and Construct D.

[0057] FIG. 8 illustrates the spike protein of SARS-COV-2 and variants thereof that may form part of the pharmaceutical compositions disclosed herein or may be encoded by the optimized nucleotides sequences disclosed herein, e.g., for use in the nucleic acid-based vaccines disclosed here. Domains, subunits, mutations to remove the furin cleavage site and mutate residues 817, 892, 899, 942, 986 and 987 with proline (P, PP, PPP, PPPPP and GSAS), the D614G mutation, removal of the ER retrieval signal and an extended N-terminal signal peptide and the relevant SEQ ID NOs are indicated. The same abbreviations are used as in FIG. 3.

[0058] FIG. 9 illustrates that an immunogenic composition of lipid nanoparticle (LNP)-encapsulated mRNA comprising an optimized nucleotide sequence encoding a full-length uncleavable pre-fusion stabilized SARS-COV-2 S protein produced a robust binding and neutralizing antibody response in mice. FIG. 9A illustrates the ELISA titers elicited in mice after immunization with two doses of 0.2 μg, 1 μg, 5 μg or 10 μg LNP-encapsulated mRNA. A group of mice to which the diluent of the mRNA-LNP composition was administered acted as a negative control. FIG. 9B illustrates the titer of neutralizing antibodies produced in mice after immunization with two doses of either 0.2 μg, 1 μg, 5 μg or 10 μg LNP-encapsulated mRNA as determined by a pseudovirus-based assay. 39 individual conversion serum samples from COVID-19 patients with mild, strong and severe symptoms (Conv Sera) acted as a positive control. As illustrated in FIG. 9C, the immunogenic composition was administered on Day 0 and Day 21. Blood was sampled on days Day −7 (baseline), Day 14, Day 21, Day 28 and Day 35.

[0059] FIG. 10 illustrates that an immunogenic composition of LNP-encapsulated mRNA comprising an optimized nucleotide sequence encoding a full-length uncleavable pre-fusion stabilized SARS-COV-2 S protein produced a Th1-biased T-cell response in mice. FIG. 10A shows that splenocytes isolated at Day 35 secreted high levels of the Th1 cytokine interferon-γ (IFN-γ). FIG. 10B shows that these splenocytes did not secrete detectable amounts of the Th2 cytokine IL-5. As illustrated in FIG. 10C, the mice were immunized with two doses of either 5 μg or 10 μg LNP-encapsulated mRNA at Day 0 and Day 21, blood was sampled on days Day −4, Day 14, Day 21, Day 28 and Day 35, and spleens were harvested at Day 35 for determination of IFN-γ and IL-5 levels by ELISPOT assay.

[0060] FIG. 11 illustrates that an immunogenic composition of LNP-encapsulated mRNA comprising an optimized nucleotide sequence encoding a full-length uncleavable pre-fusion stabilized SARS-COV-2 S protein produced a robust binding and neutralizing antibody response in cynomolgus monkeys. FIG. 11A illustrates the ELISA titer elicited in cynomolgus monkeys after immunization with two doses of 15 μg, 45 μg or 135 μg LNP-encapsulated mRNA. FIG. 11B illustrates the titers of neutralizing antibodies produced in cynomolgus monkeys after immunization with two doses of 15 μg, 45 μg or 135 μg LNP-encapsulated mRNA, as determined by a pseudovirus-based assay. FIG. 11C illustrates the microneutralization titers produced in cynomolgus monkeys after immunization with two doses of either 15 μg, 45 μg or 135 μg LNP-encapsulated mRNA. 39 individual conversion serum samples from COVID-19 patients with mild, strong and severe symptoms (Conv Sera) acted as a positive control in the assays illustrated by FIGS. 11B and 11C. As illustrated in FIG. 11D, the immunogenic composition was administered on Day 0 and Day 21. Blood was sampled on days Day −4 (baseline), Day 2, Day 7, Day 14, Day 21, Day 23, Day 28 and Day 35 and Day 42. Peripheral blood mononuclear cells (PMCs) were isolated on Day 42 to determine the cell-mediated immunity (CMI) elicited by the test composition.

[0061] FIG. 12 illustrates that an immunogenic composition of LNP-encapsulated mRNA comprising an optimized nucleotide sequence encoding a full-length uncleavable pre-fusion stabilized SARS-COV-2 S protein produced a Th1-biased T-cell response in cynomolgus monkeys. The monkeys were immunized with two doses of either 5 μg or 10 μg LNP-encapsulated mRNA at Day 0 and Day 21. FIGS. 12A and 12C show that PMBCs isolated on Day 42 secreted high levels of the Th1 cytokine interferon-γ (IFN-γ) after stimulation with peptide pools S1 and S2, respectively (SARS-COV-2 S protein-derived peptides). FIGS. 12B and 12D show that these PMBCs secreted only baseline levels of the Th2 cytokine IL-13 in response to peptide stimulation. Naïve (non-activated and non-stimulated) splenocytes served as a control to establish baseline levels of IFN-γ and IL-13 (dashed line).

[0062] FIG. 13 describes a statistical analysis of the data summarized in FIGS. 9 and 11. Pseudovirus (PsV) titers in mice for the 1 μg, 5 μg and 10 μg dose levels of the tested immunogenic composition were significantly different from the control human convalescent sera PsV titers (FIG. 13A). Spearman Correlation Coefficients (SCC) between ELISA (IgG), pseudoviral (PsV) and microneutralization (MN) titers were calculated for the cynomolgus monkey experiment summarised in FIG. 11. SCC were conducted per individual animals, and means (±Standard Errors) were calculated per dose (N=4) or all test animals (N=12). The results of this analysis are shown in FIG. 13B. FIGS. 13C and 13D illustrate that microneutralization (MN) and pseudoviral (PsV) titers in cynomolgus monkeys were significantly higher than MN and PsV titers of human convalescent sera that served as controls.

[0063] FIG. 14 illustrates the neutralizing antibody titers induced in mice and NHPs by immunization with LNP formulations comprising optimized mRNAs encoding full-length prefusion stabilized SARS-COV-2 S proteins. Mice were administered two immunizations at a three-week interval with a 0.4 μg per dose of each of five formulations (WT, 2P, GSAS, 2P/GSAS, 2P/GSAS/ALAYT). Non-human primates (NHPs) were immunized using the same immunization schedule at 5 μg per dose of six formulations (2P, GSAS, 2P/GSAS, 2P/GSAS/ALAYT, 6P and 6P/GSAS). Sera samples were collected from pre-immunized animals (Day −4) and on Day 14, 21, 28, 35 and 42 post administration. Each dot represents an individual serum sample and the line represents the geometric mean for the group. The dotted line below for each panel represents the lower limit of assay readout.

[0064] FIG. 15 illustrates the protective efficacy of LNP formulation of Example 5 in Syrian golden hamsters. (a) weight loss in hamsters administered with either a single or two dose regime; (b) H&E staining of lungs of hamsters that received either one dose 0.15 μg ( [symbol] ), 1.5 μg ( [symbol] ), 4.5 μg ( [symbol] ), 13.5 μg ( [symbol] ), Sham ( [symbol] ) or unchallenged (-∘-) animals; (c) Day 4 and Day 7 post-challenge pathogenicity scores of hamsters immunized with either one or two dose regimens; (d) Quantification of SARS-COV-2 subgenomic mRNA (sgmRNA) in lungs and nasal tissue of hamsters immunized with two doses of the LNP formulation of Example 5 as compared to control (Sham and Naïve) on Day 4 and Day 7 post-infection (DPI).

[0065] FIG. 16 provides the strains from which the S protein was derived for the preparation of pseudoviruses (PsVs) that were used in the neutralization assays described in Example 14. For SARS-COV-2 strains, mutations compared to the SARS-COV-2 S protein from the Wuhan index strain are indicted as well as the presence of the D614G mutation. Where applicable, the GenBank number of the S-protein amino acid sequence is provided. The PsVs were obtained from Integral Molecular, and both the catalogue number and the lot number for each PsV are also indicated.

[0066] FIG. 17 illustrates that non-human primates (NHPs), which previously had been immunized with two doses of the LNP formulation of Example 5, mount an effective neutralizing antibody response against the S protein derived from the original Wuhan strain as well as naturally occurring variants of the S protein observed in South Africa, Japan/Brazil and California, and an S protein derived from a SARS-COV-1 strain after immunization with a booster mRNA vaccine encoding a South African variant of the SARS-COV-2 S protein. NHPs were administered two immunizations on day 0 and day 35 with LNP formulations that comprised an optimized mRNAs encoding full-length prefusion stabilized SARS-COV-2 S protein as described in Example 5. A booster LNP formulation comprising an mRNA encoding a corresponding S protein with mutations observed in a naturally occurring South African strain was injected on Day 305. Serum samples were taken on days 35, 308, 329 and 343. Each dot represents an individual serum sample, and the line represents the geometric mean for the group. The dotted line represents the lower limit of detection.

### DEFINITIONS

[0067] In order for the present invention to be more readily understood, certain terms are first defined below. Additional definitions for the following terms and other terms are set forth throughout the Specification.

[0068] As used in this Specification and the appended claims, the singular forms “a,” “an” and “the” include plural referents unless the context clearly dictates otherwise.

[0069] Unless specifically stated or obvious from context, as used herein, the term “or” is understood to be inclusive and covers both “or” and “and”.

[0070] The terms “e.g.,” and “i.e.” as used herein, are used merely by way of example, without limitation intended, and should not be construed as referring only those items explicitly enumerated in the specification.

[0071] Unless specifically stated or evident from context, as used herein, the term “about” is understood as within a range of normal tolerance in the art, for example within 2 standard deviations of the mean. “About” can be understood to be within 10%, 9%, 8%, 7%, 6%, 5%, 4%, 3%, 2%, 1%, 0.5%, 0.1%, 0.05%, 0.01%, or 0.001% of the stated value. Unless otherwise clear from the context, all numerical values provided herein reflects normal fluctuations that can be appreciated by a skilled artisan.

[0072] As used herein, term “abortive transcript” or “pre-aborted transcript” or the like is any transcript that is shorter than a full-length mRNA molecule encoded by the DNA template that results from the premature release of RNA polymerase from the template DNA in a sequence-independent manner. In some embodiments, an abortive transcript may be less than 90% of the length of the full-length mRNA molecule that is transcribed from the target DNA molecule, e.g., less than 80%, 70%, 60%, 50%, 40%, 30%, 20%, 10%, 5%, 1% of the length of the full-length mRNA molecule.

[0073] As used herein, the terms “codon” and “codons” refer to a sequence of three nucleotides which together form a unit of the genetic code. Each codon corresponds to a specific amino acid or stop signal in the process of translation or protein synthesis. The genetic code is degenerate, and more than one codon can encode a specific amino acid residue. For example, codons can comprise DNA or RNA nucleotides.

[0074] As used herein, the terms “codon optimization” and “codon-optimized” refer to modifications of the codon composition of a naturally-occurring or wild-type nucleic acid encoding a peptide, polypeptide or protein that do not alter its amino acid sequence, thereby improving protein expression of said nucleic acid. In the context of the present invention, “codon optimization” may also refer to the process by which one or more optimized nucleotide sequences are arrived at by removing with filters less than optimal nucleotide sequences from a list of nucleotide sequences, such as filtering by guanine-cytosine content, codon adaptation index, presence of destabilizing nucleic acid sequences or motifs, and/or presence of pause sites and/or terminator signals.

[0075] As used herein, “full-length mRNA” is as characterized when using a specific assay, e.g., gel electrophoresis and detection using UV and UV absorption spectroscopy with separation by capillary electrophoresis. The length of an mRNA molecule that encodes a full-length polypeptide is at least 50% of the length of a full-length mRNA molecule that is transcribed from the target DNA, e.g., at least 60%, 70%, 80%, 90%, 91%, 92%, 93%, 94%, 95%, 96%, 97%, 98%, 99%, 99.01%, 99.05%, 99.1%, 99.2%, 99.3%, 99.4%, 99.5%, 99.6%, 99.7%, 99.8%, 99.9% of the length of a full-length mRNA molecule that is transcribed from the target DNA.

[0076] As used herein, the term “in vitro” refers to events that occur in an artificial environment, e.g., in a test tube or reaction vessel, in cell culture, etc., rather than within a multi-cellular organism.

[0077] As used herein, the term “in vivo” refers to events that occur within a multi-cellular organism, such as a human and a non-human animal. In the context of cell-based systems, the term may be used to refer to events that occur within a living cell (as opposed to, for example, in vitro systems).

[0078] As used herein, the term “messenger RNA (mRNA)” refers to a polyribonucleotide that encodes at least one polypeptide. mRNA as used herein encompasses both modified and unmodified RNA. mRNA may contain one or more coding and non-coding regions. mRNA can be purified from natural sources, produced using recombinant expression systems and optionally purified, in vitro transcribed, or chemically synthesized. Where appropriate, e.g., in the case of chemically synthesized molecules, mRNA can comprise nucleoside analogs such as analogs having chemically modified bases or sugars, backbone modifications, etc. An mRNA sequence is presented in the 5′ to 3′ direction unless otherwise indicated.

[0079] As used herein, the term “nucleic acid,” in its broadest sense, refers to any compound and/or substance that is or can be incorporated into a polynucleotide chain. In some embodiments, a nucleic acid is a compound and/or substance that is or can be incorporated into a polynucleotide chain via a phosphodiester linkage. In some embodiments, “nucleic acid” refers to individual nucleic acid residues (e.g., nucleotides and/or nucleosides). In some embodiments, “nucleic acid” refers to a polynucleotide chain comprising individual nucleic acid residues. In some embodiments, “nucleic acid” encompasses RNA as well as single and/or double-stranded DNA and/or cDNA. Furthermore, the terms “nucleic acid,” “DNA,” “RNA,” and/or similar terms include nucleic acid analogs, i.e., analogs having other than a phosphodiester backbone. A nucleic acid sequence is presented in the 5′ to 3′ direction unless otherwise indicated.

[0080] As used herein, the term “nucleotide sequence”, in its broadest sense, refers to the order of nucleobases within a nucleic acid. In some embodiments, “nucleotide sequence” refers to the order of individual nucleobases within a gene. In some embodiments, “nucleotide sequence” refers to the order of individual nucleobases within a protein-coding gene. In some embodiments, “nucleotide sequence” refers to the order of individual nucleobases within single and/or double stranded DNA and/or cDNA. In some embodiments, “nucleotide sequence” refers to the order of individual nucleobases within RNA. In some embodiments, “nucleotide sequence” refers to the order of individual nucleobases within mRNA. In a particular embodiment, “nucleotide sequence” refers to the order of individual nucleobases within the protein-coding sequence of RNA or DNA. A nucleotide sequence is normally presented in the 5′ to 3′ direction unless otherwise indicated.

[0081] As used herein, the term “premature termination” refers to the termination of transcription before the full length of the DNA template has been transcribed. As used herein, premature termination can be caused by the presence of a nucleotide sequence motif (also referred to herein simply as “motif”), e.g., a termination signal, within the DNA template and results in mRNA transcripts that are shorter than the full length mRNA (“prematurely terminated transcripts” or “truncated mRNA transcripts”). Examples of a termination signal include the E. coli rrnB terminator t1 signal (consensus sequence: ATCTGTT) and variants thereof, as described herein.

[0082] As used herein, the term “template DNA” (or “DNA template”) relates to a DNA molecule comprising a nucleic acid sequence encoding an mRNA transcript to be synthesized by in vitro transcription. The template DNA is used as template for in vitro transcription in order to produce the mRNA transcript encoded by the template DNA. The template DNA comprises all elements necessary for in vitro transcription, particularly a promoter element for binding of a DNA-dependent RNA polymerase, such as, e.g., T3, T7 and SP6 RNA polymerases, which is operably linked to the DNA sequence encoding a desired mRNA transcript. Furthermore the template DNA may comprise primer binding sites 5′ and/or 3′ of the DNA sequence encoding the mRNA transcript to determine the identity of the DNA sequence encoding the mRNA transcript, e.g., by PCR or DNA sequencing. The “template DNA” in the context of the present invention may be a linear or a circular DNA molecule. As used herein, the term “template DNA” may refer to a DNA vector, such as a plasmid DNA, which comprises a nucleic acid sequence encoding the desired mRNA transcript.

[0083] As used herein, the term “preventing” refers to partially or completely inhibiting the onset of one or more symptoms or features of a particular infection, disease, disorder, and/or condition.

[0084] As used herein, the term “prophylaxis” refers to partially or completely inhibiting the onset of one or more symptoms or features of a particular infection, disease, disorder, and/or condition.

[0085] As used herein, the term “treating” refers to partially or completely alleviating, ameliorating, improving, relieving, delaying onset of, inhibiting progression of, reducing severity of, and/or reducing incidence of one or more symptoms or features of a particular infection, disease, disorder, and/or condition.

[0086] As used herein, the term “immunogenic composition” means a composition comprising a nucleic acid or protein that, when administered to a subject, elicits an immune response. In some embodiments, the “immunogenic composition” comprises a nucleic acid. In some embodiments, the nucleic acid is mRNA. In some embodiments, the nucleic acid is DNA. It should be understood that the terms “immunogenic composition” and “vaccine” are used interchangeably herein and are thus meant to have equivalent meanings.

[0087] Percentage sequence identity between two nucleotide (or amino acid) sequences is determined after alignment of the two sequences. This alignment and the percentage sequence identity can be determined using software programs known in the art, for example those described in section 7.7.18 of Current Protocols in Molecular Biology (F. M. Ausubel et al., eds., 1987) Supplement 30. In the context of the present invention, an alignment is determined by the Smith-Waterman homology search algorithm using an affine gap search with a gap open penalty of 12 and a gap extension penalty of 2, BLOSUM matrix of 62. The Smith-Waterman homology search algorithm is disclosed in Smith & Waterman (1981) Adv. Appl. Math. 2:482-489. A comparison is then carried out between respective nucleotides (or amino acids) located at the same position in the two nucleotide (or amino acid) sequences. When a given position is occupied by the same nucleotide (or amino acid) in the two nucleotide (or amino acid) sequences, these sequences are identical for this position. The percentage of sequence identity is then determined from the number of positions for which respective nucleotides (or amino acids) are identical, over the total number of nucleotides (or amino acids) in the nucleotide (or amino acid) sequence with which the comparison is made.

[0088] All technical and scientific terms used herein have the same meaning as commonly understood by one of ordinary skill in the art to which this application belongs and as commonly used in the art to which this application belongs. The publications and other reference materials referenced herein to describe the background of the invention and to provide additional detail regarding its practice are hereby incorporated by reference.

### DETAILED DESCRIPTION OF THE INVENTION

[0089] The present invention addresses the need for generating optimized nucleotide sequences encoding a protein antigen for the effective treatment or prevention of an infectious disease through the provision of a vaccine comprising an mRNA with the optimized nucleotide sequence. A method is provided for processing a naturally occurring nucleotide sequence encoding a protein antigen to produce at least one optimized nucleotide sequence. The optimized nucleotide sequence is designed to increase the expression of the encoded protein antigen compared to the expression of the protein associated with the naturally occurring nucleotide sequence. Codon optimization can modify the composition of a protein-coding nucleotide sequence based on various criteria without altering the sequence of translated amino acids of the encoded protein antigen, due to the redundancy in the genetic code.

[0090] To avoid imbalance between mRNA codon usage and abundance of cognate tRNAs, codon optimization can provide a composition of codons within a nucleotide sequence that better matches the naturally occurring abundance of transfer RNAs (tRNAs) in a host cell and avoids depletion of a specific tRNA. As tRNA abundance influences the rate of protein translation, codon optimization of a nucleotide sequence can increase the efficiency of protein translation and yield for the encoded protein. For example, by not using rare codons which are characterized by a low codon usage, efficiency of protein translation and protein yield can be increased, as the shortage of rare tRNAs can stall or terminate protein translation.

[0091] Codon optimization can come at the cost of reduced functional activity of the encoded protein and an associated loss in efficacy as the process may remove information encoded in the nucleotide sequence that is important for controlling translation of the protein and ensuring proper folding of the nascent polypeptide chain (Mauro & Chappell, Trends Mol Med. 2014; 20 (11): 604-13). The inventors have found that optimized sequences which retain some variety, i.e. do not necessarily include only one codon encoding each amino acid, can achieve increased protein yield while retaining functional activity of the encoded protein.

### Generation of Optimized Nucleotide Sequences

[0092] FIGS. 1A and 1B illustrate a process for generating optimized nucleotide sequences in accordance with the invention. The process first generates a list of codon-optimized sequences and then applies three filters to the list. Specifically, it applies a motif screen filter, guanine-cytosine (GC) content analysis filter, and codon adaptation index (CAI) analysis filter to produce an updated list of optimized nucleotide sequences. The updated list no longer includes nucleotide sequences containing features that are expected to interfere with effective transcription and/or translation of the encoded protein antigen.

### Codon Optimization

[0093] The genetic code has 64 possible codons. Each codon comprises a sequence of three nucleotides. The usage frequency for each codon in the protein-coding regions of the genome can be calculated by determining the number of instances that a specific codon appears within the protein-coding regions of the genome, and subsequently dividing the obtained value by the total number of codons that encode the same amino acid within protein-coding regions of the genome. A codon usage table contains experimentally derived data regarding how often, for the particular biological source from which the table has been generated, each codon is used to encode a certain amino acid. This information is expressed, for each codon, as a percentage (0 to 100%), or fraction (0 to 1), of how often that codon is used to encode a certain amino acid relative to the total number of times a codon encodes that amino acid.

[0094] Codon usage tables are stored in publically available databases, such as the Codon Usage Database (Nakamura et al. (2000) Nucleic Acids Research 28 (1), 292; available online at https://www.kazusa.or.jp/codon/), and the High-performance Integrated Virtual Environment-Codon Usage Tables (HIVE-CUTs) database (Athey et al., (2017), BMC Bioinformatics 18 (1), 391; available online at http://hive.biochemistry.gwu.edu/review/codon).

[0095] During the first step of codon optimization, codons are removed from a first codon usage table which reflects the frequency of each codon in a given organism (e.g., a mammal or human) if they are associated with a codon usage frequency which is less than a threshold frequency (e.g., 10%). The codon usage frequencies of the codons not removed in the first step are normalized to generate a normalized codon usage table. An optimized nucleotide sequence encoding an amino acid sequence of interest is generated by selecting a codon for each amino acid in the amino acid sequence based on the usage frequency of the one or more codons associated with a given amino acid in the normalized codon usage table. The probability of selecting a certain codon for a given amino acid is equal to the usage frequency associated with the codon associated with this amino acid in the normalized codon usage table.

[0096] The codon-optimized sequences of the invention are generated by a computer-implemented method for generating an optimized nucleotide sequence. The method comprises: (i) receiving an amino acid sequence, wherein the amino acid sequence encodes a peptide, polypeptide, or protein; (ii) receiving a first codon usage table, wherein the first codon usage table comprises a list of amino acids, wherein each amino acid in the table is associated with at least one codon and each codon is associated with a usage frequency; (iii) removing from the codon usage table any codons associated with a usage frequency which is less than a threshold frequency; (iv) generating a normalized codon usage table by normalizing the usage frequencies of the codons not removed in step (iii); and (v) generating an optimized nucleotide sequence encoding the amino acid sequence by selecting a codon for each amino acid in the amino acid sequence based on the usage frequency of the one or more codons associated with the amino acid in the normalized codon usage table. The threshold frequency can be in the range of 5%-30%, in particular 5%, 10%, 15%, 20%, 25%, or 30%. In the context of the present invention, the threshold frequency is typically 10%.

[0097] The step of generating a normalized codon usage table comprises: (a) distributing the usage frequency of each codon associated with a first amino acid and removed in step (iii) to the remaining codons associated with the first amino acid; and (b) repeating step (a) for each amino acid to produce a normalized codon usage table. In some embodiments, the usage frequency of the removed codons is distributed equally amongst the remaining codons. In some embodiments, the usage frequency of the removed codons is distributed amongst the remaining codons proportionally based on the usage frequency of each remaining codon. “Distributed” in this context may be defined as taking the combined magnitude of the usage frequencies of removed codons associated with a certain amino acid and apportioning some of this combined frequency to each of the remaining codons encoding the certain amino acid.

[0098] The step of selecting a codon for each amino acid comprises: (a) identifying, in the normalized codon usage table, the one or more codons associated with a first amino acid of the amino acid sequence; (b) selecting a codon associated with the first amino acid, wherein the probability of selecting a certain codon is equal to the usage frequency associated with the codon associated with the first amino acid in the normalized codon usage table; and (c) repeating steps (a) and (b) until a codon has been selected for each amino acid in the amino acid sequence.

[0099] The step of generating an optimized nucleotide sequence by selecting a codon for each amino acid in the amino acid sequence (step (v) in the above method) is performed n times to generate a list of optimized nucleotide sequences.

### Motif Screen

[0100] A motif screen filter is applied to the list of optimized nucleotide sequences. Optimized nucleotide sequences encoding any known negative cis-regulatory elements and negative repeat elements are removed from the list to generate an updated list.

[0101] For each optimized nucleotide sequence in the list, it is also determined whether it contains a termination signal. Any nucleotide sequence that contains one or more termination signals is removed from the list generating an updated list. In some embodiments, the termination signal has the following nucleotide sequence: 5′-X₁ATCTX₂TX₃-3′, wherein X₁, X₂ and X₃ are independently selected from A, C, T or G. In some embodiments, the termination signal has one of the following nucleotide sequences: TATCTGTT; and/or TTTTTT; and/or AAGCTT; and/or GAAGAGC; and/or TCTAGA. In some embodiments, the termination signal has the following nucleotide sequence: 5′-X₁AUCUX₂UX₃-3′, wherein X₁, X₂ and X₃ are independently selected from A, C, U or G. In some embodiments, the termination signal has one of the following nucleotide sequences: UAUCUGUU; and/or UUUUUU; and/or AAGCUU; and/or GAAGAGC; and/or UCUAGA.

### Guanine-Cytosine (GC) Content

[0102] The method further comprises determining a guanine-cytosine (GC) content of each of the optimized nucleotide sequences in the updated list of optimized nucleotide sequences. The GC content of a sequence is the percentage of bases in the nucleotide sequence that are guanine or cytosine. The list of optimized nucleotide sequences is further updated by removing any nucleotide sequence from the list, if its GC content falls outside a predetermined GC content range.

[0103] Determining a GC content of each of the optimized nucleotide sequences comprises, for each nucleotide sequence: determining a GC content of one or more additional portions of the nucleotide sequence, wherein the additional portions are non-overlapping with each other and with the first portion, and wherein updating the list of optimized sequences comprises: removing the nucleotide sequence if the GC content of any portion falls outside the predetermined GC content range, optionally wherein determining the GC content of the nucleotide sequence is halted when the GC content of any portion is determined to be outside the predetermined GC content range. In some embodiments, the first portion and/or the one or more additional portions of the nucleotide sequence comprise a predetermined number of nucleotides, optionally wherein the predetermined number of nucleotides is in the range of: 5 to 300 nucleotides, or 10 to 200 nucleotides, or 15 to 100 nucleotides, or 20 to 50 nucleotides. In the context of the present invention, the predetermined number of nucleotides is typically 30 nucleotides. The predetermined GC content range can be 15%-75%, or 40%-60%, or, 30%-70%. In the context of the present invention, the predetermined GC content range is typically 30%-70%.

[0104] A suitable GC content filter in the context of the invention may first analyze the first 30 nucleotides of the optimized nucleotide sequence, i.e., nucleotides 1 to 30 of the optimized nucleotide sequence. Analysis may comprise determining the number of nucleotides in the portion with are either G or C, and determining the GC content of the portion may comprise dividing the number of G or C nucleotides in the portion by the total number of nucleotides in the portion. The result of this analysis will provide a value describing the proportion of nucleotides in the portion that are G or C, and may be a percentage, for example 50%, or a decimal, for example 0.5. If the GC content of the first portion falls outside a predetermined GC content range, the optimized nucleotide sequence may be removed from the list of optimized nucleotide sequences.

[0105] If the GC content of the first portion falls inside the predetermined GC content range, the GC content filter may then analyze a second portion of the optimized nucleotide sequence. In this example, this may be the second 30 nucleotides, i.e., nucleotides 31 to 60, of the optimized nucleotide sequence. The portion analysis may be repeated for each portion until either: a portion is found having a GC content falling outside the predetermined GC content range, in which case the optimized nucleotide sequence may be removed from the list, or the whole optimized nucleotide sequence has been analyzed and no such portion has been found, in which case the GC content filter retains the optimized nucleotide sequence in the list and may move on to the next optimized nucleotide sequence in the list.

### Codon Adaptation Index (CAI)

[0106] The method further comprises determining a codon adaptation index of each of the optimized nucleotide sequences in the most recently updated list of optimized nucleotide sequences. The codon adaptation index of a sequence is a measure of codon usage bias and can be a value between 0 and 1. The most recently updated list of optimized nucleotide sequences is further updated by removing any nucleotide sequence if its codon adaptation index is less than or equal to a predetermined codon adaptation index threshold. The codon adaptation index threshold can 0.7, or 0.75, or 0.8, or 0.85, or 0.9. The inventors have found that optimized nucleotide sequences with a codon adaptation index equal to or greater than 0.8 deliver very high protein yield. Therefore in the context of the invention, the codon adaptation index threshold is typically 0.8.

[0107] A codon adaptation index may be calculated, for each optimized nucleotide sequence, in any way that would be apparent to a person skilled in the art, for example as described in “The codon adaptation index—a measure of directional synonymous codon usage bias, and its potential applications” (Sharp and Li, 1987. Nucleic Acids Research 15 (3), p. 1281-1295); available online at https://www.ncbi.nlm.nih.gov/pmc/articles/PMC340524/.

[0108] Implementing a codon adaptation index calculation may include a method according to, or similar to, the following. For each amino acid in a sequence, a weight of each codon in a sequence may be represented by a parameter termed relative adaptiveness (wᵢ). Relative adaptiveness may be computed from a reference sequence set, as the ratio between the observed frequency of the codon fᵢ and the frequency of the most frequent synonymous codon fⱼ for that amino acid. The codon adaptation index of a sequence may then be calculated as the geometric mean of the weight associated to each codon over the length of the sequence (measured in codons). The reference sequence set used to calculate codon adaptation index may be the same reference sequence set from which a codon usage table used with methods of the invention is derived.

### Synthesis of Optimized Nucleotide Sequences

[0109] Once a list of optimized nucleotide sequences has been generated, in vitro synthesis (also referred to commonly as “in vitro transcription”) can be performed with a nucleic acid vector such as a linear or circular DNA template containing a promoter, a pool of ribonucleotide triphosphates, a buffer system that may include DTT and magnesium ions, and an appropriate RNA polymerase (e.g., T3, T7, or SP6 RNA polymerase), DNase I, pyrophosphatase, and/or RNase inhibitor. The exact conditions will vary according to the specific application.

[0110] The nucleic acid vector typically is a plasmid. The term ‘plasmid’ or ‘plasmid nucleic acid vector’ refers to a circular nucleic acid molecule, e.g., to an artificial nucleic acid molecule. A plasmid DNA in the context of the present invention is suitable for incorporating or harboring a desired nucleic acid sequence, such as a nucleic acid sequence comprising a sequence encoding an mRNA transcript and/or an open reading frame encoding at least protein antigen. Such plasmid DNA constructs/vectors may be expression vectors, cloning vectors, transfer vectors etc.

[0111] The nucleic acid vector typically comprises a sequence corresponding to (coding for) a desired mRNA transcript, or a part thereof, such as a sequence corresponding to the optimized nucleotide sequence encoding a protein antigen and the 5′- and/or 3′UTR of an mRNA. In some embodiments, the sequence corresponding to the desired mRNA transcript may also encode a poly A-tail after the 3′ UTR so that the poly A-tail is included with the mRNA transcript. More typically in the context of the present invention, the sequence corresponding to the desired mRNA transcript consists of the 5′/3′ UTRs and the open reading frame. In some embodiments of the invention, the mRNA transcript synthesized from the nucleic acid vector during in vitro transcription does not contain a polyA tail. A polyA tail may be added to the mRNA transcript in a post-synthesis processing step.

### Screening of Optimized Nucleotide Sequences

[0112] Individual in vitro transcribed, capped and tailed mRNAs encoding an optimized nucleotide sequence encoding a protein antigen can be transfected into a cell either in vivo or in vitro to determine the expression level of the protein encoded by the optimized nucleotide sequence. An mRNA encoding, e.g., a naturally occurring nucleotide sequence encoding the protein antigen, or a codon-optimized nucleotide sequence encoding the protein antigen prepared with a method other than the process for generating an optimized nucleotide sequence described herein, may serve as a control mRNA. Each mRNA and control mRNA are contacted with a separate cell or organism, wherein the cell or organism contacted. An mRNA comprising an optimized nucleotide sequence generated in accordance with the invention is selected for use in a immunogenic composition in accordance with the present invention if it produces an increased yield of the protein antigen compared to the yield of the protein produced by the cell or organism contacted with a control mRNA.

[0113] Methods well-known in the art, such as western blotting, are suitable to experimentally verify that the optimized nucleotide sequence results in increased expression and production of the encoded protein antigen. Furthermore, multiple optimized nucleotide sequences generated by the methods of the present invention can be screened to identify the sequence or sequences which generate the highest protein yield. In some embodiments, the expression level of the protein encoded by the optimized nucleotide sequence is increased at least 2-fold, e.g., at least 3-fold or 4-fold.

[0114] In some embodiments, the functional activity of the protein antigen encoded by the optimized nucleotide sequence is determined. The functional activity of the protein encoded by the optimized nucleotide sequence can be determined using a range of well-established methods. These methods may vary depending on the properties of the encoded protein antigen. For example, antibodies recognizing a conformational epitope on the protein antigen may be used to confirm proper folding of the protein antigen expressed from the optimized nucleotide sequence. Alternatively or in addition, in embodiments of the invention relating to a spike protein of SARS-CoV-2, the spike protein may be contacted with human angiotensin-converting enzyme 2 (ACE2) to confirm its receptor binding activity. Binding activity is typically assessed relative to a control, such a spike protein of SARS-COV-2 expressed from a naturally occurring coding sequence.

### SARS-COV-2 Proteins

[0115] Coronaviruses (CoVs) are the largest group of viruses belonging to the Nidovirales order, which includes Coronaviridae, Arteriviridae, and Roniviridae families. CoVs are spherical enveloped viruses with a positive-sense single-stranded RNA genome and a nucleocapsid of helical symmetry with a diameter of approximately 125 nm.

[0116] SARS-COV-2 is a β-coronavirus, like other coronaviruses that infect humans, such as MERS-COV and SARS-COV. The first two-thirds of the viral 30 kb RNA genome, mainly named as ORF1a/b region, encodes two polyproteins (pp1a and pp1ab), which constitute the main non-structural proteins. The remaining genome encodes accessory proteins and four essential structural proteins, namely the spike(S) glycoprotein, small envelope (E) protein, matrix/membrane (M) protein, and nucleocapsid (N) proteins (Kang et al. (2020) https://doi.org/10.1101/2020.03.06.977876). SARS-COV-2 uses its S protein to bind host cell receptors (ACE2 in human) and mediate cell entry. This makes S protein the main target for neutralizing antibodies, as discussed in detail below.

### Spike Glycoprotein (S Protein)

[0117] Cell entry depends on the binding of S proteins to receptors on the cell surface and on S protein priming by host cell proteases. The S protein comprises two functional subunits responsible for binding to the host cell receptor (S1 subunit) and fusion of the viral and cellular membranes (S2 subunit) (FIG. 3). The S protein forms a homotrimer that produces a distinctive spike structure on the surface of the virus. The S1 subunit has a large receptor-binding domain (RBD), while S2 forms the stalk of the spike molecule. The amino acid sequence of the full-length SARS-COV-2 S glycoprotein is provided by SEQ ID NO: 1 (Gen Bank QHD43416.1). The S1 subunit is located at residues 1 to 681, the S2 subunit is located at residues 686 to 1208 and the S2′ subunit is located at residues 816 to 1208. The C-terminal end of the S protein contains a transmembrane domain, and the last 19 amino acids of the cytoplasmic tail contain an endoplasmic reticulum (ER)-retention signal.

[0118] References to the naturally occurring SARS-COV-2 S protein refer to the full-length SARS-COV-2 S glycoprotein provided by SEQ ID NO: 1. Any modifications to the naturally occurring SARS-COV-2 S protein are numbered based on the residues in SEQ ID NO:1

[0119] Although the observed diversity among pandemic SARS-COV-2 sequences is low, its rapid global spread provides the virus with ample opportunity for natural selection to act upon rare but favorable mutations. It is advantageous to target the sequences of the circulating SARS-CoV-2 virus rather than just the index strain from Wuhan (i.e. SEQ ID NO: 1).

[0120] An amino acid change in the SARS-COV-2 S glycoprotein, D614G, emerged early during the 2020 COVID-19 pandemic and as of July 2020 has become the most prevalent form of the virus around the world. Patients infected with G614 shed more viral nucleic acid compared with those with D614, and G614-bearing viruses show significantly higher infectious titers in vitro than their D614 counterparts (Korber et al., 2020, Cell 182, 1-16). Optimized nucleotide sequence encoding a SARS-COV-2 S protein comprising a D614G mutation may therefore particularly suitable for use in immunogenic composition as described herein.

[0121] Other rare mutations that have been identified in the SARS-COV-2 S protein are summarized in the table below (Korber et al. 2020-https://doi.org/10.1101/2020.04.29.069054):

| Spike Mutation | Spike location possible impact |
|---|---|
| L5F | Signal Peptide |
| L8V/W | Signal Peptide |
| H49Y | S1 NTD domain |
| Y145H/del | S1 NTD domain |
| Q239K | S1 NTD domain |
| V367F | Up/Down conformations |
| G476S | Directly in the RBD |
| V483A | Up/Down conformations |
| V6151/F | In SARS-CoV ADE epitope |
| A831V | Potential fusion peptide in S2 |
| D839Y/N/E | S2 subunit |
| S943P | Fusion core of HR1 |
| P1263L | Cytoplasmic Tail |

Further SARS-COV-2 S glycoprotein mutations include: L18F, HV 69-70 deletion, Y144 deletion, E154Q, Q218E, A222V, S447N, F490S, S494P, N501Y, A570D, E583D, T618E, P681H, A701V, T716I, T723I, 1843V, S982A and D1118H. In late 2020, new SARS-COV-2 variants emerged in the UK, South Africa, Brazil and California that contained multiple mutations. The mutations present in the SARS-COV-2 S glycoprotein in the UK variant (named lineage B.1.1.7) include a H69 deletion (ΔH69), V70 deletion (ΔV70), a Y144 deletion (ΔY144), N501Y, A570D, P681H, T716I, S982A and D1118H (Rambaut et al. 2020 https://virological.org/t/preliminary-genomic-characterisation-of-an-emergent-sars-cov-2-lineage-in-the-uk-defined-by-a-novel-set-of-spike-mutations/563). In October 2020, the South African variant (named lineage B.1.351) includes six mutations in the SARS-COV-2 S glycoprotein protein-D80A, K417N, E484K, N501Y, D614G and A701V. By the end of November, three further SARS-COV-2 S glycoprotein mutations had emerged (L18F, R246I and K417N) and the deletion of three amino acids at L242 (ΔL242), A243 (ΔA243) and L244 (ΔL244) (Tegally et al. (2020) https://doi.org/10.1101/2020.12.21.20248640). The mutations present in the SARS-COV-2 S glycoprotein in the Brazilian variant (named linage P.1) include L18F, T20N, P26S, D138Y, R190S, K417T, E484K, N501Y, H655Y, T1027I and V1176F. The mutations present in the SARS-COV-2 S glycoprotein in the Californian variant (known as CAL.20C) include S13I, W152C and L452R (Zhang et al. (2021) https://doi.org/10.1101/2021.01.18.21249786).

[0122] In some embodiments, the amino acid sequence of the full-length SARS-COV-2 S glycoprotein can have multiple mutations. For example, two or more, three or more, four or more, five or more, six or more, seven or more, eight or more, nine or more, ten or more of mutations relative to the amino acid sequence of SEQ ID NO: 1. The mutations in the SARS-COV-2 S glycoprotein can be amino acid deletions or amino acid substitutions. Possible combinations of mutations include: (a) L18F, A222V, D614G; (b) A222V, D614G; (c) A222V, E583D, D614G; (d) S447N, D614G; (e) E154Q, F490S, D614G, 1834V; (f) D614G, A701V; (g) Q218E, D614G; (h) D614G, T618R; (i) ΔL242, ΔA243, ΔL244; (j) A222V, E583D, A701V; (k) ΔH69, ΔV70, ΔY144, N501Y, A570D, D614G, P681H, T716I, S982A, D1118H (UK variant+D614G); (1) D80A, K417N, E484K, N501Y, D614G and A701V (South African fixed mutations+D614G); (m) D80A, K417N, E484K, N501Y and A701V (South African fixed mutations; (n) D80A, D215G, ΔL242, ΔA243, ΔL244, A417V, E484K, N501Y, D614G, A701V (South African variant 1+D614G); (o) L18F, D80A, D215G, ΔL242, ΔA243, ΔL244, K417N, E484K, N501Y, D614G and A701V (South African variant 2+D614G); (p) L18F, T20N, P26S, D138Y, R190S, K417T, E484K, N501Y, D614G, H655Y, T1027I and V1176F (the Brazilian variant+D614G) and (q) S13I, W152C, L452R and D614G (Californian variant+D614G).

[0123] In some embodiments, the amino acid sequence of the full-length SARS-COV-2 S glycoprotein can have one or more of mutations relative to the amino acid sequence of SEQ ID NO: 1. This may include one or more of the following mutations: D614G mutation, L5F mutation, L8V/W mutation, H49Y mutation, Y145H/del mutation, Q239K mutation, V367F mutation, G476S mutation, V483A mutation, V6151/F mutation, A831V mutation, D839Y/N/E mutation, S943P mutation, P1263L mutation. Accordingly, in particular embodiments, any of the S proteins or antigenic fragments thereof described herein comprises a D614G mutation. For example, in particular embodiments, the SARS-COV-2 spike protein, the ectodomain thereof or the antigenic fragment thereof comprises a D614G mutation.

[0124] In some embodiments, any of the S proteins or antigenic fragments thereof described herein comprises the L5F mutation. In some embodiments, any of the S proteins or antigenic fragments thereof described herein comprises the L8V/W mutation. In some embodiments, any of the S proteins or antigenic fragments thereof described herein comprises the H49Y mutation. In some embodiments, any of the S proteins or antigenic fragments thereof described herein comprises the Y145H/del mutation. In some embodiments, any of the S proteins or antigenic fragments thereof described herein comprises the Q239K mutation. In some embodiments, any of the S proteins or antigenic fragments thereof described herein comprises the V367F mutation. In some embodiments, any of the S proteins or antigenic fragments thereof described herein comprises the G476S mutation. In some embodiments, any of the S proteins or antigenic fragments thereof described herein comprises the V483A mutation. In some embodiments, any of the S proteins or antigenic fragments thereof described herein comprises the V6151/F mutation. In some embodiments, any of the S proteins or antigenic fragments thereof described herein comprises the A831V mutation. In some embodiments, any of the S proteins or antigenic fragments thereof described herein comprises the D839Y/N/E mutation. In some embodiments, any of the S proteins or antigenic fragments thereof described herein comprises the S943P mutation. In some embodiments, any of the S proteins or antigenic fragments thereof described herein comprises the P1263L mutation.

[0125] An optimized nucleotide sequence according to the present invention may encode the SARS-COV-2 S protein or an antigenic fragment thereof. In particular embodiments, the optimized nucleotide sequence encodes a full-length SARS-COV-2 S protein. The full-length SARS-COV-2 S protein can have the amino acid sequence comprising SEQ ID NO: 1 or an amino acid sequence at least 95%, 96%, 97%, 98%, or 99% identical to SEQ ID NO: 1. In some embodiment, the optimized nucleotide sequence encoding the full-length SARS-COV-2 S protein has the sequence of SEQ ID NO: 29. In other embodiments, the optimized nucleotide sequence is at least 60%, 65%, 70%, 75%, 80%, 85%, 90%, 95%, 96%, 97%, 98%, or 99% identical to SEQ ID NO:29 and encodes the amino acid sequence of SEQ ID NO:1.

[0126] In some embodiments, the optimized nucleotide sequence encodes a SARS-COV-2 S protein comprising one or more mutations relative to the amino acid sequence of SEQ ID NO: 1. For example, in some embodiments, the optimized nucleotide sequence encodes a SARS-COV2 S protein comprising one or more of the following mutations: D614G mutation, L5F mutation, L8V/W mutation, H49Y mutation, Y145H/del mutation, Q239K mutation, V367F mutation, G476S mutation, V483A mutation, V6151/F mutation, A831V mutation, D839Y/N/E mutation, S943P mutation, P1263L mutation. Accordingly, in particular embodiments, the optimized nucleotide sequence encodes a SARS-COV2 S protein comprising the D614G mutation. For example, in particular embodiments the optimized nucleotide sequence encodes a SARS-COV-2 spike protein, an ectodomain thereof or an antigenic fragment thereof which comprises the D614G mutation.

[0127] In some embodiments, the optimized nucleotide sequence encodes a SARS-COV2 S protein comprising the L5F mutation. In some embodiments, the optimized nucleotide sequence encodes a SARS-COV2 S protein comprising the L8V/W mutation. In some embodiments, the optimized nucleotide sequence encodes a SARS-COV2 S protein comprising the H49Y mutation. In some embodiments, the optimized nucleotide sequence encodes a SARS-COV2 S protein comprising the Y145H/del mutation. In some embodiments, the optimized nucleotide sequence encodes a SARS-COV2 S protein comprising the Q239K mutation. In some embodiments, the optimized nucleotide sequence encodes a SARS-COV2 S protein comprising the V367F mutation. In some embodiments, the optimized nucleotide sequence encodes a SARS-COV2 S protein comprising the G467S mutation. In some embodiments, the optimized nucleotide sequence encodes a SARS-COV2 S protein comprising the V483A mutation. In some embodiments, the optimized nucleotide sequence encodes a SARS-COV2 S protein comprising the V6151/F mutation. In some embodiments, the optimized nucleotide sequence encodes a SARS-COV2 S protein comprising the A831V mutation. In some embodiments, the optimized nucleotide sequence encodes a SARS-COV2 S protein comprising the D839Y/N/E mutation. In some embodiments, the optimized nucleotide sequence encodes a SARS-COV2 S protein comprising the S943P mutation. In some embodiments, the optimized nucleotide sequence encodes a SARS-CoV2 S protein comprising the P1263L mutation.

[0128] Alternatively, an optimized nucleotide sequence according to the present invention may encode an antigenic fragment of the SARS-COV-2 S protein. In certain embodiments, the optimized nucleotide sequence may encode the ectodomain of the SARS-COV-2 S protein, which can have the amino acid sequence of SEQ ID NO:2 or an amino acid sequence at least 95%, 96%, 97%, 98%, or 99% identical to SEQ ID NO: 2. The ectodomain does not contain residues 1209-1273 of the full length SARS-COV-2 S protein, which includes the transmembrane domain and the cytoplasmic tail. In some embodiments, the optimized nucleotide sequence encoding the ectodomain of the SARS-COV-2 S protein has the sequence of SEQ ID NO: 30. In other embodiments, the optimized nucleotide sequence is at least 60%, 65%, 70%, 75%, 80%, 85%, 90%, 95%, 96%, 97%, 98%, or 99% identical to SEQ ID NO: 30 and encodes the amino acid sequence of SEQ ID NO: 2.

[0129] In other embodiments, an antigenic fragment of the SARS-COV-2 S protein may comprise one or more of the S1 subunit, the S2 subunit and/or the S2′ subunit of the SARS-COV-2 S protein. For example, the optimized nucleotide sequence may encode the S1 subunit, which has the amino acid sequence of SEQ ID NO: 3. Accordingly, in one embodiment, the optimized nucleotide sequence may encode an amino acid sequence comprising SEQ ID NO:3. In one embodiment, an optimized nucleotide sequence encoding the S1 subunit of the SARS-COV-2 S protein has the sequence of SEQ ID NO: 31. In other embodiments, the optimized nucleotide sequence is at least 60%, 65%, 70%, 75%, 80%, 85%, 90%, 95%, 96%, 97%, 98%, or 99% identical to SEQ ID NO: 31 and encodes the amino acid sequence of SEQ ID NO: 3. In an alternative embodiment, the optimized nucleotide sequence may encode the S2 subunit, which has the amino acid sequence of SEQ ID NO: 4. Accordingly, in one embodiment, the optimized nucleotide sequence may encode an amino acid sequence comprising SEQ ID NO: 4. In one embodiment, an optimized nucleotide sequence encoding the S2 subunit of the SARS-COV-2 S protein has the sequence of SEQ ID NO: 32. In other embodiments, the optimized nucleotide sequence is at least 60%, 65%, 70%, 75%, 80%, 85%, 90%, 95%, 96%, 97%, 98%, or 99% identical to SEQ ID NO: 32 and encodes the amino acid sequence of SEQ ID NO: 4. In an alternative embodiment, the optimized nucleotide sequence may encode the S2′ subunit, which has the amino acid sequence of SEQ ID NO: 5. Accordingly, in one embodiment, the optimized nucleotide sequence may encode an amino acid sequence comprising SEQ ID NO: 5. In one embodiment, an optimized nucleotide sequence encoding the S2′ subunit of the SARS-COV-2 S protein has the sequence of SEQ ID NO: 33. In other embodiments, the optimized nucleotide sequence is at least 60%, 65%, 70%, 75%, 80%, 85%, 90%, 95%, 96%, 97%, 98%, or 99% identical to SEQ ID NO: 33 and encodes the amino acid sequence of SEQ ID NO: 5.

[0130] In some embodiments, an antigenic fragment of the SARS-COV-2 S protein may comprise the full length S2 subunit or S2′ subunit of the SARS-COV-2 S protein. The full length S2 subunit or S2′ subunit comprises the transmembrane domain and the cytoplasmic tail. The full length S2 subunit encompasses residues 686 to 1273 of the SARS-COV-2 S protein and the S2′ subunit encompasses residues 816 to 1273 of the SARS-COV-2 S protein. For example, the optimized nucleotide sequence may encode the full length S2 subunit, which has the amino acid sequence of SEQ ID NO:72. Accordingly, in one embodiment, the optimized nucleotide sequence may encode an amino acid sequence comprising SEQ ID NO:72. In one embodiment, an optimized nucleotide sequence encoding the full length S2 subunit of the SARS-COV-2 S protein has the sequence of SEQ ID NO: 71. In other embodiments, the optimized nucleotide sequence is at least 60%, 65%, 70%, 75%, 80%, 85%, 90%, 95%, 96%, 97%, 98%, or 99% identical to SEQ ID NO:71 and encodes the amino acid sequence of SEQ ID NO: 72. In an alternative embodiment, the optimized nucleotide sequence may encode the full length S2′ subunit, which has the amino acid sequence of SEQ ID NO: 98. Accordingly, in one embodiment, the optimized nucleotide sequence may encode an amino acid sequence comprising SEQ ID NO: 98. In one embodiment, an optimized nucleotide sequence encoding the full length S2′ subunit of the SARS-COV-2 S protein has the sequence of SEQ ID NO:97. In other embodiments, the optimized nucleotide sequence is at least 81 and encodes the amino acid sequence of SEQ ID NO:98.

[0131] The SARS-COV-2 S protein mediates viral entry into host cells by first binding to the angiotensin-converting enzyme 2 (ACE2) receptor through the receptor-binding domain (RBD), which is located in the S1 subunit, and then fusing the viral and host membranes through the S2 subunit (Tai et al. (2020) Cellular and Molecular immunology, doi.org/10.1038/s41423-020-0400-4). Tai et al. identified a region of the RBD of SARS-COV-2 at residues 331 to 524 of the S protein. A putative RBD from residues 331 to 521 of the SARS-COV-2 S protein is provided by SEQ ID NO: 6 in Table 2 below. A recombinant fusion protein containing 193-amino acid RBD (residues 318-510) of SARS-COV and a human IgG1 Fc fragment has been shown to induce highly potent antibody responses in rabbits immunized with it (He et al. (2004) Biochem Biophys Res Commun; 324 (2): 773-781.). Therefore, the RBD of SARS-COV-2 S protein may also be able to highly induce an antibody response. Both the RBD of SARS-COV and the RBD of SARS-COV-2 bind to ACE2. Therefore, it is contemplated that the antigenic fragment of the SARS-COV-2 S protein may encode the RBD. Accordingly, in particular embodiments, the optimized nucleotide sequence may encode an amino acid sequence comprising the RBD of the SARS-COV-2 S protein, which has the amino acid sequence of SEQ ID NO: 6. In one embodiment, an optimized nucleotide sequence encoding the RBD of the SARS-COV-2 S protein has the sequence of SEQ ID NO: 34. In other embodiments, the optimized nucleotide sequence is at least 60%, 65%, 70%, 75%, 80%, 85%, 90%, 95%, 96%, 97%, 98%, or 99% identical to SEQ ID NO: 34 and encodes the amino acid sequence of SEQ ID NO: 6.

[0132] In certain embodiments, the antigenic fragment of the SARS-COV-2 S protein is fused with an exogenous N-terminal signal peptide. The signal peptide targets the protein to the ER and the secretory pathway, so that the protein enters the secretory pathway in the host cell in which it is expressed. In particular embodiments, the invention provides an antigenic fragment of the SARS-COV-2 S protein operably linked with an N-terminal signal peptide. For example, the RBD of the SARS-COV-2 S protein may be operably linked to the N-terminal signal peptide, which enables the resulting protein to be secreted from the host cell expressing it.

[0133] In specific embodiments, the N-terminal signal peptide can have the sequence MFVFLVLLPLVSSQC (SEQ ID NO: 7), which is the native signal peptide of the naturally occurring SARS-COV-2 S protein. In some embodiments, the signal peptide is encoded by the nucleotide sequence ATGTTCGTCTTCCTCGTGCTGCTCCCACTCGTTTCTTCCCAGTGT (SEQ ID NO: 37). Numerous other signal peptides are known in the art, which can be used to secrete a protein from a host cell, for example those mentioned in the review by Freudl (2018) Microbial Cell Factories 17:52. An alternative signal peptide that can be used as part of the invention is MATGSRTSLLLAFGLLCLPWLQEGSAFPTIPLS (SEQ ID NO:38). In some embodiments, the signal peptide is encoded by the nucleotide sequence AUGGCCACUGGAUCAAGAACCUCACUGCUGCUCGCUUUUGGACUGCUUUGCCUGC CCUGGUUGCAAGAAGGAUCGGCUUUCCCGACCAUCCCACUCUCC (SEQ ID NO: 39). Another signal peptide that can be used as part of the invention is MATGSRTSLLLAFGLLCLPWLQEGSAFPTIPLS (SEQ ID NO:40). In some embodiments, the signal peptide is encoded by the nucleotide sequence AUGGCAACUGGAUCAAGAACCUCCCUCCUGCUCGCAUUCGGCCUGCUCUGUCUCC CAUGGCUCCAAGAAGGAAGCGCGUUCCCCACUAUCCCCCUCUCG (SEQ ID NO:41).

[0134] The original annotation of the SARS-COV-2 genome identified the signal peptide sequence of the SARS-COV-2 S protein as being SEQ ID NO: 7. An alternative annotation of the SARS-COV-2 genome identified a longer native N-terminal signal peptide sequence, MFLLTTKRTMFVFLVLLPLVSSQC (SEQ ID NO: 142), which is nine amino acids longer. In specific embodiments, the N-terminal signal peptide can be has the sequence of SEQ ID NO: 142.

[0135] In some embodiments, the signal peptide is encoded by the nucleotide sequence ATGTTCCTGCTGACAACAAAAAGAACCATGTTTGTGTTCCTGGTGCTGCTGCCTCTG GTGTCCTCACAGTGT (SEQ ID NO: 143).

[0136] In particular embodiments, the optimized nucleotide sequence of the invention can encode an amino acid sequence comprising the RBD of the SARS-COV-2 S protein operably linked with an N-terminal signal peptide, which has the amino acid sequence comprising SEQ ID NO: 8. In one embodiment, an optimized nucleotide sequence encoding the RBD of the SARS-COV-2 S protein operably linked with an N-terminal signal peptide has the sequence of SEQ ID NO: 35. In other embodiments, the optimized nucleotide sequence is at least 60%, 65%, 70%, 75%, 80%, 85%, 90%, 95%, 96%, 97%, 98%, or 99% identical to SEQ ID NO: 35 and encodes the amino acid sequence of SEQ ID NO: 8.

[0137] In particular embodiments, the optimized nucleotide sequence of the invention can encode the S2 subunit of the SARS-COV-2 S protein operably linked with an N-terminal signal peptide, which has the amino acid sequence comprising SEQ ID NO:74. In one embodiment, an optimized nucleotide sequence encoding the S2 subunit of the SARS-COV-2 S protein operably linked with an N-terminal signal peptide has the sequence of SEQ ID NO: 73. In other embodiments, the optimized nucleotide sequence is at least 60%, 65%, 70%, 75%, 80%, 85%, 90%, 95%, 96%, 97%, 98%, or 99% identical to SEQ ID NO: 73 and encodes the amino acid sequence of SEQ ID NO: 74.

[0138] In particular embodiments, the optimized nucleotide sequence of the invention can encode the S2′ subunit of the SARS-COV-2 S protein operably linked with an N-terminal signal peptide, which has the amino acid sequence comprising SEQ ID NO:66. In one embodiment, an optimized nucleotide sequence encoding the S2 subunit of the SARS-COV-2 S protein operably linked with an N-terminal signal peptide has the sequence of SEQ ID NO: 65. In other embodiments, the optimized nucleotide sequence is at least 60%, 65%, 70%, 75%, 80%, 85%, 90%, 95%, 96%, 97%, 98%, or 99% identical to SEQ ID NO: 65 and encodes the amino acid sequence of SEQ ID NO:66.

[0139] In particular embodiments, the optimized nucleotide sequence of the invention can encode the full length S2 subunit of the SARS-COV-2 S protein operably linked with an N-terminal signal peptide, which has the amino acid sequence comprising SEQ ID NO:68. In one embodiment, an optimized nucleotide sequence encoding the full length S2 subunit of the SARS-COV-2 S protein operably linked with an N-terminal signal peptide has the sequence of SEQ ID NO: 67. In other embodiments, the optimized nucleotide sequence is at least 60%, 65%, 70%, 75%, 80%, 85%, 90%, 95%, 96%, 97%, 98%, or 99% identical to SEQ ID NO: 67 and encodes the amino acid sequence of SEQ ID NO:68. In particular embodiments, the optimized nucleotide sequence of the invention can encode the full length S2′ subunit of the SARS-COV-2 S protein operably linked with an N-terminal signal peptide, which has the amino acid sequence comprising SEQ ID NO:96. In one embodiment, an optimized nucleotide sequence encoding the full length S2′ subunit of the SARS-COV-2 S protein operably linked with an N-terminal signal peptide has the sequence of SEQ ID NO: 95. In other embodiments, the optimized nucleotide sequence is at least 60%, 65%, 70%, 75%, 80%, 85%, 90%, 95%, 96%, 97%, 98%, or 99% identical to SEQ ID NO: 95 and encodes the amino acid sequence of SEQ ID NO:96.

[0140] CoV S proteins are typical class I viral fusion proteins, which require protease cleavage in order for the fusion potential of S protein to be activated. A two-step sequential protease cleavage model has been proposed for activation of S proteins of SARS-COV-2 S protein, (1) priming cleavage between the S1 and S2 subunits and (2) activating cleavage on the S2′ site (Ou et al. (2020) Nature communications, 11, 1620). The SARS-COV-2 S protein harbors a furin cleavage site at the boundary between the S1/S2 subunits, which is processed during biogenesis, which sets this virus apart from SARS-COV and SARS-related CoVs (Walls et al. (2020) Cell doi.org/10.1016/j.cell.2020.02.058).

[0141] In some embodiments, an optimized nucleotide sequence according to the present invention may encode a prefusion stabilized SARS-COV-2 S protein, a prefusion stabilized ectodomain of the SARS-COV-2 S protein, or an antigenic fragment of either, which has been modified relative to naturally occurring SARS-COV-2 S protein by removing the furin cleavage site required for activation, by mutating residues 986 and 987 to proline and which contains an extended N-terminal signal peptide. For example, an optimized nucleotide sequence may encode a prefusion stabilized SARS-COV-2 S protein, which has an amino acid sequence comprising SEQ ID NO: 123. In one embodiment, the optimized nucleotide sequence has the sequence of SEQ ID NO: 122. In other embodiments, the optimized nucleotide sequence is at least 60%, 65%, 70%, 75%, 80%, 85%, 90%, 95%, 96%, 97%, 98%, or 99% identical to SEQ ID NO: 122 and encodes the amino acid sequence of SEQ ID NO: 123.

[0142] In some embodiments, an optimized nucleotide sequence according to the present invention may encode a prefusion stabilized SARS-COV-2 S protein, a prefusion stabilized ectodomain of the SARS-COV-2 S protein, or an antigenic fragment of either, which has been modified relative to naturally occurring SARS-COV-2 S protein by removing the furin cleavage site required for activation, by mutating residues 817, 892, 899, 942, 986 and 987 to proline and which contains an extended N-terminal signal peptide. For example, an optimized nucleotide sequence may encode a prefusion stabilized SARS-COV-2 S protein, which has an amino acid sequence comprising SEQ ID NO: 137. In one embodiment, the optimized nucleotide sequence has the sequence of SEQ ID NO: 136. In other embodiments, the optimized nucleotide sequence is at least 60%, 65%, 70%, 75%, 80%, 85%, 90%, 95%, 96%, 97%, 98%, or 99% identical to SEQ ID NO: 136 and encodes the amino acid sequence of SEQ ID NO: 137.

[0143] Prefusion stabilization tends to increase the recombinant expression of viral fusion glycoproteins, possibly by preventing misfolding that results from a tendency of such proteins to adopt the more stable postfusion structure. Prefusion-stabilized viral glycoproteins are considered superior immunogens to their wild-type counterparts.

[0144] A prefusion stabilized conformation of the SARS-COV-2 S protein can be created by mutating the furin cleavage site in order to prevent the cleavage of the S1 and S2 subunits. For example, the RRAR residues in the furin cleavage site (positions 682-685) can be mutated to GSAS residues (i.e. R682G R683S A684A R685S). Accordingly, in some embodiments, an optimized nucleotide sequence in accordance with the invention may encode a prefusion stabilized SARS-CoV-2 S protein, a prefusion stabilized ectodomain of the SARS-COV-2 S protein, or an antigenic fragment of either, in which has been modified relative to naturally occurring SARS-COV-2 S protein by removing the furin cleavage site required for activation, e.g., by replacing the amino acid residues recognized by furin with alternative amino acids that do not form a furin cleavage site but maintain the structure of the S protein. In a specific embodiment, the RRAR furin cleavage site residues 682-685 can be mutated to the residues GSAS to remove the furin cleavage site. In particular embodiments, an optimized nucleotide sequence may encode a prefusion stabilized SARS-COV-2 S protein, which has an amino acid sequence comprising SEQ ID NO: 9. In one embodiment, an optimized nucleotide sequence encoding a prefusion stabilized SARS-COV-2 S protein has the sequence of SEQ ID NO: 42. In other embodiments, the optimized nucleotide sequence is at least 60%, 65%, 70%, 75%, 80%, 85%, 90%, 95%, 96%, 97%, 98%, or 99% identical to SEQ ID NO: 42 and encodes the amino acid sequence of SEQ ID NO: 9.

[0145] The SARS-COV-2 S protein can be stabilized in its prefusion conformation by substituting one or more of residues 985, 986 and 987 (i.e., D985P) with proline. For example, a prefusion stabilized conformation of the SARS-COV-2 S protein can be created by making one stabilizing proline mutation at residue 985 (i.e., D985P); two stabilizing proline mutations at residues 986 and 987 (i.e., K986P, V987P); or three stabilizing proline mutations at residues 985, 986 and 987 (i.e., D985P, K986P, V987P).

[0146] In some embodiments, an optimized nucleotide sequence according to the present invention may encode a prefusion stabilized SARS-COV-2 S protein, a prefusion stabilized ectodomain of the SARS-COV-2 S protein, or an antigenic fragment of either, which has been modified relative to naturally occurring SARS-COV-2 S protein by mutating residues 986 and 987 to proline. For example, an optimized nucleotide sequence may encode a prefusion stabilized SARS-COV-2 S protein, which has an amino acid sequence comprising SEQ ID NO:10. In one embodiment, the optimized nucleotide sequence has the sequence of SEQ ID NO: 43. In other embodiments, the optimized nucleotide sequence is at least 60%, 65%, 70%, 75%, 80%, 85%, 90%, 95%, 96%, 97%, 98%, or 99% identical to SEQ ID NO: 43 and encodes the amino acid sequence of SEQ ID NO: 10. In further embodiments, an optimized nucleotide sequence may encode a prefusion stabilized SARS-COV-2 S protein, which has an amino acid sequence comprising SEQ ID NO: 118. This amino acid sequence comprises the D614G mutation. In one embodiment, the optimized nucleotide sequence has the sequence of SEQ ID NO: 119. In specific embodiments, the optimized nucleotide sequence is at least 60%, 65%, 70%, 75%, 80%, 85%, 90%, 95%, 96%, 97%, 98%, or 99% identical to SEQ ID NO: 119 and encodes the amino acid sequence of SEQ ID NO: 118.

[0147] In certain embodiments, an optimized nucleotide sequence may encode a prefusion stabilized variant of the S2 subunit of the SARS-COV-2 S protein, which has an amino acid sequence comprising SEQ ID NO:78. In one embodiment, the optimized nucleotide sequence has the sequence of SEQ ID NO: 77. In other embodiments, the optimized nucleotide sequence is at least 60%, 65%, 70%, 75%, 80%, 85%, 90%, 95%, 96%, 97%, 98%, or 99% identical to SEQ ID NO: 77 and encodes the amino acid sequence of SEQ ID NO:78. In certain embodiments, an optimized nucleotide sequence may encode a prefusion stabilized variant of the full length S2 subunit of the SARS-COV-2 S protein, which has an amino acid sequence comprising SEQ ID NO: 70. In one embodiment, the optimized nucleotide sequence has the sequence of SEQ ID NO: 69. In other embodiments, the optimized nucleotide sequence is at least 60%, 65%, 70%, 75%, 80%, 85%, 90%, 95%, 96%, 97%, 98%, or 99% identical to SEQ ID NO:69 and encodes the amino acid sequence of SEQ ID NO: 70.

[0148] In certain embodiments, an optimized nucleotide sequence may encode a prefusion stabilized variant of the S2′ subunit of the SARS-COV-2 S protein, which has an amino acid sequence comprising SEQ ID NO:82. In one embodiment, the optimized nucleotide sequence has the sequence of SEQ ID NO:81. In other embodiments, the optimized nucleotide sequence is at least 60%, 65%, 70%, 75%, 80%, 85%, 90%, 95%, 96%, 97%, 98%, or 99% identical to SEQ ID NO: 81 and encodes the amino acid sequence of SEQ ID NO:82. In certain embodiments, an optimized nucleotide sequence may encode a prefusion stabilized variant of the full length S2′ subunit of the SARS-COV-2 S protein, which has an amino acid sequence comprising SEQ ID NO: 86. In one embodiment, the optimized nucleotide sequence has the sequence of SEQ ID NO: 85. In other embodiments, the optimized nucleotide sequence is at least 60%, 65%, 70%, 75%, 80%, 85%, 90%, 95%, 96%, 97%, 98%, or 99% identical to SEQ ID NO:85 and encodes the amino acid sequence of SEQ ID NO:86.

[0149] In some embodiments, an optimized nucleotide sequence according to the present invention may encode a prefusion stabilized SARS-COV-2 S protein, a prefusion stabilized ectodomain of the SARS-COV-2 S protein, or an antigenic fragment of either, which has been modified relative to naturally occurring SARS-COV-2 S protein by mutating residue 985 to proline. For example, an optimized nucleotide sequence may encode a prefusion stabilized SARS-COV-2 S protein, which has an amino acid sequence comprising SEQ ID NO:88. In one embodiment, the optimized nucleotide sequence has the sequence of SEQ ID NO: 87. In other embodiments, the optimized nucleotide sequence is at least 60%, 65%, 70%, 75%, 80%, 85%, 90%, 95%, 96%, 97%, 98%, or 99% identical to SEQ ID NO: 87 and encodes the amino acid sequence of SEQ ID NO: 88.

[0150] In some embodiments, a prefusion stabilized conformation of the SARS-COV-2 S protein can be created by making three stabilizing proline mutations in the C-terminal of the S2 subunit at residues 985, 986 and 987 (i.e., D985P, K986P, V987P). In some embodiments, an optimized nucleotide sequence according to the present invention may encode a prefusion stabilized SARS-CoV-2 S protein, a prefusion stabilized ectodomain of the SARS-COV-2 S protein, or an antigenic fragment of either, which has been modified relative to naturally occurring SARS-COV-2 S protein by mutating residues 985, 986 and 987 to proline. For example, an optimized nucleotide sequence may encode a prefusion stabilized SARS-COV-2 S protein, which has an amino acid sequence comprising SEQ ID NO:92. In one embodiment, the optimized nucleotide sequence has the sequence of SEQ ID NO: 91. In other embodiments, the optimized nucleotide sequence is at least 60%, 65%, 70%, 75%, 80%, 85%, 90%, 95%, 96%, 97%, 98%, or 99% identical to SEQ ID NO: 91 and encodes the amino acid sequence of SEQ ID NO: 92.

[0151] In some embodiments, a prefusion stabilized conformation of the SARS-COV-2 S protein can be created by mutating the furin cleavage site in order to prevent the cleavage of the SI and S2 subunits and (a) by making two stabilizing proline mutations at residues 986 and 987 (i.e., K986P, V987P) and/or (b) by making a stabilizing proline mutation at residue 985. For example, an optimized nucleotide sequence according to the present invention may encode a prefusion stabilized SARS-COV-2 S protein, a prefusion stabilized ectodomain of the SARS-COV-2 S protein, or an antigenic fragment of either, which has been modified relative to naturally occurring SARS-COV-2 S protein by removing the furin cleavage site required for activation and by mutating residues 986 and 987 to proline. In some embodiments, the residues forming the furin cleavage site at residues 682-685 are mutated to the residues GSAS. For example, an optimized nucleotide sequence may encode a prefusion stabilized SARS-COV-2 S protein, which has an amino acid sequence comprising SEQ ID NO:11. In one embodiment, the optimized nucleotide sequence has the sequence of SEQ ID NO: 44. In other embodiments, the optimized nucleotide sequence is at least 60%, 65%, 70%, 75%, 80%, 85%, 90%, 95%, 96%, 97%, 98%, or 99% identical to SEQ ID NO: 44 and encodes the amino acid sequence of SEQ ID NO: 11. In further embodiments, an optimized nucleotide sequence may encode a prefusion stabilized SARS-COV-2 S protein, which has an amino acid sequence comprising SEQ ID NO: 120. This amino acid sequence comprises the D614G mutation. In one embodiment, the optimized nucleotide sequence has the sequence of SEQ ID NO: 121. In some embodiments, the optimized nucleotide sequence is at least 60%, 65%, 70%, 75%, 80%, 85%, 90%, 95%, 96%, 97%, 98%, or 99% identical to SEQ ID NO: 121 and encodes the amino acid sequence of SEQ ID NO: 120. Alternatively, the optimized nucleotide sequence encodes a prefusion stabilized ectodomain of the SARS-COV-2 S protein which has been modified relative to naturally occurring SARS-COV-2 S protein, which has an amino acid sequence comprising SEQ ID NO:12. In one embodiment, the optimized nucleotide sequence has the sequence of SEQ ID NO: 45. In other embodiments, the optimized nucleotide sequence is at least 60%, 65%, 70%, 75%, 80%, 85%, 90%, 95%, 96%, 97%, 98%, or 99% identical to SEQ ID NO: 45 and encodes the amino acid sequence of SEQ ID NO: 12.

[0152] In certain embodiments, an optimized nucleotide sequence according to the present invention may encode a prefusion stabilized SARS-COV-2 S protein, a prefusion stabilized ectodomain of the SARS-COV-2 S protein, or an antigenic fragment of either, which has been modified relative to naturally occurring SARS-COV-2 S protein by removing the furin cleavage site required for activation and by mutating residue 985 to proline. In some embodiments, the residues forming the furin cleavage site at residues 682-685 are mutated to the residues GSAS. For example, an optimized nucleotide sequence may encode a prefusion stabilized SARS-COV-2 S protein, which has an amino acid sequence comprising SEQ ID NO:90. In one embodiment, the optimized nucleotide sequence has the sequence of SEQ ID NO: 89. In other embodiments, the optimized nucleotide sequence is at least 60%, 65%, 70%, 75%, 80%, 85%, 90%, 95%, 96%, 97%, 98%, or 99% identical to SEQ ID NO: 89 and encodes the amino acid sequence of SEQ ID NO: 90.

[0153] In certain embodiments, an optimized nucleotide sequence according to the present invention may encode a prefusion stabilized SARS-COV-2 S protein, a prefusion stabilized ectodomain of the SARS-COV-2 S protein, or an antigenic fragment of either, which has been modified relative to naturally occurring SARS-COV-2 S protein by removing the furin cleavage site required for activation and by mutating residues 985, 986 and 987 to proline. In some embodiments, the residues forming the furin cleavage site at residues 682-685 are mutated to the residues GSAS. For example, an optimized nucleotide sequence may encode a prefusion stabilized SARS-COV-2 S protein, which has an amino acid sequence comprising SEQ ID NO:94. In one embodiment, the optimized nucleotide sequence has the sequence of SEQ ID NO: 93. In other embodiments, the optimized nucleotide sequence is at least 60%, 65%, 70%, 75%, 80%, 85%, 90%, 95%, 96%, 97%, 98%, or 99% identical to SEQ ID NO: 93 and encodes the amino acid sequence of SEQ ID NO: 94.

[0154] The SARS-COV-2 S protein can be further stabilized in its prefusion conformation by substituting one or more of residues 817, 892, 899 and 942 (i.e F817P, A892P, A899P and A942P) with proline. For example, a prefusion stabilized conformation of the SARS-COV-2 S protein can be created by making one stabilizing proline mutation at residue 817 (i.e., F817P); two stabilizing proline mutations at residues 817 and 892 (i.e., F817P, A892P,); or three stabilizing proline mutations at residues 817, 892, 899 (i.e., F817P, A892P, A899P,); or four stabilizing proline mutations at residues 817, 892, 899 and 942 (i.e. F817P, A892P, A899P, A942P). In some embodiments, an optimized nucleotide sequence according to the present invention may encode a prefusion stabilized SARS-COV-2 S protein, a prefusion stabilized ectodomain of the SARS-COV-2 S protein, or an antigenic fragment of either, which has been modified relative to naturally occurring SARS-COV-2 S protein by mutating residues 817, 892, 899 and 942 to proline.

[0155] In preferred embodiments, a prefusion stabilized conformation of the SARS-COV-2 S protein can be created by making stabilizing proline mutations at residues 817, 892, 899, 942, 986. In some embodiments, the optimized nucleotide sequence according to the present invention may encode a prefusion stabilized SARS-COV-2 S protein, a prefusion stabilized ectodomain of the SARS-COV-2 S protein, or an antigenic fragment of either, which has been modified relative to naturally occurring SARS-COV-2 S protein by mutating residues 817, 892, 899, 942, 986 and 987 to proline. For example, an optimized nucleotide sequence may encode a prefusion stabilized SARS-COV-2 S protein, which has an amino acid sequence comprising SEQ ID NO: 129. In one embodiment, the optimized nucleotide sequence has the sequence of SEQ ID NO: 128. In other embodiments, the optimized nucleotide sequence is at least 60%, 65%, 70%, 75%, 80%, 85%, 90%, 95%, 96%, 97%, 98%, or 99% identical to SEQ ID NO: 128 and encodes the amino acid sequence of SEQ ID NO: 129.

[0156] In some embodiments, an optimized nucleotide sequence according to the present invention may encode a prefusion stabilized SARS-COV-2 S protein, a prefusion stabilized ectodomain of the SARS-COV-2 S protein, or an antigenic fragment of either, which has been modified relative to naturally occurring SARS-COV-2 S protein by removing the furin cleavage site required for activation and by mutating residues 817, 892, 899, 942, 986 and 987 to proline. For example, an optimized nucleotide sequence may encode a prefusion stabilized SARS-COV-2 S protein, which has an amino acid sequence comprising SEQ ID NO: 131. In one embodiment, the optimized nucleotide sequence has the sequence of SEQ ID NO: 130. In other embodiments, the optimized nucleotide sequence is at least 60%, 65%, 70%, 75%, 80%, 85%, 90%, 95%, 96%, 97%, 98%, or 99% identical to SEQ ID NO: 130 and encodes the amino acid sequence of SEQ ID NO: 131.

[0157] In some embodiments, an optimized nucleotide sequence according to the present invention may encode a prefusion stabilized SARS-COV-2 S protein, a prefusion stabilized ectodomain of the SARS-COV-2 S protein, or an antigenic fragment of either, which has been modified relative to naturally occurring SARS-COV-2 S protein by mutating residues 817, 892, 899, 942, 986 and 987 to proline and which contains the D614G mutation. For example, an optimized nucleotide sequence may encode a prefusion stabilized SARS-COV-2 S protein, which has an amino acid sequence comprising SEQ ID NO: 133. In one embodiment, the optimized nucleotide sequence has the sequence of SEQ ID NO: 132. In other embodiments, the optimized nucleotide sequence is at least 60%, 65%, 70%, 75%, 80%, 85%, 90%, 95%, 96%, 97%, 98%, or 99% identical to SEQ ID NO: 132 and encodes the amino acid sequence of SEQ ID NO: 133.

[0158] In some embodiments, an optimized nucleotide sequence according to the present invention may encode a prefusion stabilized SARS-COV-2 S protein, a prefusion stabilized ectodomain of the SARS-COV-2 S protein, or an antigenic fragment of either, which has been modified relative to naturally occurring SARS-COV-2 S protein by removing the furin cleavage site required for activation, by mutating residues 817, 892, 899, 942, 986 and 987 to proline and which contains the D614G mutation. For example, an optimized nucleotide sequence may encode a prefusion stabilized SARS-COV-2 S protein, which has an amino acid sequence comprising SEQ ID NO: 135. In one embodiment, the optimized nucleotide sequence has the sequence of SEQ ID NO: 134. In other embodiments, the optimized nucleotide sequence is at least 60%, 65%, 70%, 75%, 80%, 85%, 90%, 95%, 96%, 97%, 98%, or 99% identical to SEQ ID NO: 134 and encodes the amino acid sequence of SEQ ID NO: 135.

[0159] A T4 bacteriophage fibritin Foldon can be placed at the C terminus of an antigenic fragment the SARS-COV-2 S protein in order to help induce trimer formation. Foldons have been used to produce trimeric influenza hemagglutinin stem domains for use in influenza vaccines (Lu et al. (2014) PNAS, 111, 1, 124-130). The Foldon can have the amino acid sequence of GYIPEAPRDGQAYVRKDGEWVLLSTFL (SEQ ID NO: 13). Accordingly, optimized nucleotide sequences according to the present invention may encode an ectodomain of the SARS-CoV-2 S protein, or an antigenic fragment thereof, and a C terminal Foldon. In particular embodiments, the Foldon is placed at the C terminus of the ectodomain of the SARS-COV-2 S protein or the S2′ subunit of the SARS-COV-2 S protein. In one embodiment, the invention provides an optimized nucleotide sequence that encodes an amino acid sequence comprising the ectodomain of the SARS-COV-2 S protein with a C terminal Foldon, which has an amino acid sequence comprising SEQ ID NO:14. In one embodiment, the optimized nucleotide sequence has the sequence of SEQ ID NO: 46. In other embodiments, the optimized nucleotide sequence is at least 60%, 65%, 70%, 75%, 80%, 85%, 90%, 95%, 96%, 97%, 98%, or 99% identical to SEQ ID NO: 46 and encodes the amino acid sequence of SEQ ID NO: 14. The invention also provides an optimized nucleotide sequence that encodes an amino acid sequence comprising the S2 subunit of the SARS-COV-2 S protein with a C terminal Foldon, which has an amino acid sequence comprising SEQ ID NO: 76. In one embodiment, the optimized nucleotide sequence has the sequence of SEQ ID NO: 75. In other embodiments, the optimized nucleotide sequence is at least 60%, 65%, 70%, 75%, 80%, 85%, 90%, 95%, 96%, 97%, 98%, or 99% identical to SEQ ID NO: 75 and encodes the amino acid sequence of SEQ ID NO: 76. The invention also provides an optimized nucleotide sequence that encodes an amino acid sequence comprising the S2′ subunit of the SARS-COV-2 S protein with a C terminal Foldon, which has an amino acid sequence comprising SEQ ID NO: 15. In one embodiment, the optimized nucleotide sequence has the sequence of SEQ ID NO: 47. In other embodiments, the optimized nucleotide sequence is at least 60%, 65%, 70%, 75%, 80%, 85%, 90%, 95%, 96%, 97%, 98%, or 99% identical to SEQ ID NO: 47 and encodes the amino acid sequence of SEQ ID NO: 15.

[0160] In some embodiments, the optimized nucleotide sequence encodes a prefusion stabilized ectodomain of the SARS-COV-2 S protein with a C terminal Foldon, wherein the ectodomain has been modified relative to the ectodomain of the naturally occurring SARS-COV-2 S protein by removing the furin cleavage site required for activation and/or by mutating residues 986 and 987 to proline. In particular embodiments, an optimized nucleotide sequence encodes a prefusion stabilized ectodomain of the SARS-COV-2 S protein with a C terminal Foldon, which has an amino acid sequence comprising SEQ ID NO: 16. In one embodiment, the optimized nucleotide sequence has the sequence of SEQ ID NO: 48. In other embodiments, the optimized nucleotide sequence is at least 60%, 65%, 70%, 75%, 80%, 85%, 90%, 95%, 96%, 97%, 98%, or 99% identical to SEQ ID NO: 48 and encodes the amino acid sequence of SEQ ID NO: 16. In other particular embodiments, an optimized nucleotide sequence encodes a prefusion stabilized ectodomain of the SARS-COV-2 S protein with a C terminal Foldon, wherein the ectodomain been modified relative to naturally occurring SARS-COV-2 S protein by removing the furin cleavage site required for activation and by mutating residues 986 and 987 to proline. Accordingly, in a particular embodiment, an optimized nucleotide sequence encodes a prefusion stabilized ectodomain of the SARS-COV-2 S protein, which has an amino acid sequence comprising SEQ ID NO: 17. In one embodiment, the optimized nucleotide sequence has the sequence of SEQ ID NO: 49. In other embodiments, the optimized nucleotide sequence is at least 60%, 65%, 70%, 75%, 80%, 85%, 90%, 95%, 96%, 97%, 98%, or 99% identical to SEQ ID NO: 49 and encodes the amino acid sequence of SEQ ID NO: 17.

[0161] In some embodiments, the optimized nucleotide sequence encodes a prefusion stabilized ectodomain of the S2 or S2′ subunit of the SARS-COV-2 S protein with a C terminal Foldon, wherein compared to the naturally occurring SARS-COV-2 S protein residues 986 and 987 have been mutated to proline. Accordingly, in a particular embodiment, an optimized nucleotide sequence encodes a prefusion stabilized S2 subunit of the SARS-COV-2 S protein, which has the amino acid sequence comprising SEQ ID NO: 80. In one embodiment, the optimized nucleotide sequence has the sequence of SEQ ID NO: 79. In other embodiments, the optimized nucleotide sequence is at least 60%, 65%, 70%, 75%, 80%, 85%, 90%, 95%, 96%, 97%, 98%, or 99% identical to SEQ ID NO: 79 and encodes the amino acid sequence of SEQ ID NO: 80. Accordingly, in a particular embodiment, an optimized nucleotide sequence encodes a prefusion stabilized S2 subunit of the SARS-COV-2 S protein which has an amino acid sequence comprising SEQ ID NO: 84. In one embodiment, the optimized nucleotide sequence has the sequence of SEQ ID NO: 83. In other embodiments, the optimized nucleotide sequence is at least 60%, 65%, 70%, 75%, 80%, 85%, 90%, 95%, 96%, 97%, 98%, or 99% identical to SEQ ID NO: 83 and encodes the amino acid sequence of SEQ ID NO: 84.

[0162] The presence of the Fc domain in a protein markedly increases the plasma half-life of the protein and thereby prolongs the molecule's therapeutic activity. The Fc domain is also able to slow renal clearance of a protein from the blood stream and enables the protein to interact with Fc-receptors (FcRs) found on immune cells, a feature that may be advantageous for their use in vaccines. In addition, the Fc domain folds independently and can improve the solubility and stability of the partner molecule both in vitro and in vivo (Czajkowsky et al (2012) EMBO Mol Med. (10): 1015-1028). Accordingly, the invention also provides an optimized nucleotide sequence that encodes an amino acid sequence comprising the ectodomain of the SARS-COV-2 S protein or an antigenic fragment thereof with a C-terminal Fc domain. The Fc domain can comprise the following amino acid sequence: PKSCDKTHTCPPCPAPELLGGPSVFLFPPKPKDTLMISRTPEVTCVVVDVSHEDPEVKFN WYVDGVEVHNAKTKPREEQYNSTYRVVSVLTVLHQDWLNGKEYKCKVSNKALPAPIE KTISKAKGQPREPQVYTLPPSRDELTKNQVSLTCLVKGFYPSDIAVEWESNGQPENNYK TTPPVLDSDGSFFLYSKLTVDKSRWQQGNVFSCSVMHEALHNHYTQKSLSLSPGK (SEQ ID NO: 18). In particular embodiments, the antigenic fragment is the RBD of the SARS-COV-2 S protein. In some embodiments, an optimized nucleotide sequence encodes an amino acid sequence comprising the RBD of the SARS-COV-2 S protein and an Fc domain, which has an amino acid sequence comprising SEQ ID NO: 19. In one embodiment, the optimized nucleotide sequence has the sequence of SEQ ID NO: 50. In other embodiments, the optimized nucleotide sequence is at least 60%, 65%, 70%, 75%, 80%, 85%, 90%, 95%, 96%, 97%, 98%, or 99% identical to SEQ ID NO: 50 and encodes the amino acid sequence of SEQ ID NO: 19.

[0163] The invention also provides an optimized nucleotide sequence that encodes the ectodomain of the SARS-COV-2 S protein, or an antigenic fragment thereof, operably linked with an N-terminal signal peptide and a C-terminal Fc domain. The Fc can have the amino acid sequence of SEQ ID NO:18. The signal peptide can have the amino acid sequence of SEQ ID NO: 7. In particular embodiments, the antigenic fragment is the RBD of the SARS-COV-2 S protein. In some embodiments, the invention provides an optimized nucleotide sequence that encodes an amino acid sequence comprising the RBD of the SARS-COV-2 S protein operably linked with an N-terminal signal peptide and a C-terminal Fc domain, which has an amino acid sequence comprising SEQ ID NO: 20. In one embodiment, the optimized nucleotide sequence has the sequence of SEQ ID NO: 36. In other embodiments, the optimized nucleotide sequence is at least 60%, 65%, 70%, 75%, 80%, 85%, 90%, 95%, 96%, 97%, 98%, or 99% identical to SEQ ID NO: 36 and encodes the amino acid sequence of SEQ ID NO: 20.

[0164] The pharmacokinetic properties of antibodies are largely dictated by the pH-dependent binding of the Fc domain to the neonatal Fc receptor (FcRn). For example, Fc domains containing the amino acid substitutions M428L/N434S (LS mutant), M252Y/S254T/T256E (YTE mutant), or H433K/N434F (KF mutant) confer 10- to 12-fold higher affinity for FcRn at pH 5.8. This results in a large increase in antibody half-life (2- to 4-fold longer circulation times). Modifying the Fc region included in a fusion protein of the present invention can therefore extend its half-life in serum. An Fc variant containing L309D/Q311H/N434S (DHS) substitutions has been shown to further improve the pharmacokinetics of an antibody relative to both native IgG1 and the aforementioned variants (Lee et al. (2019) Nature communications, 10, 5031). Accordingly, in certain embodiments, the Fc region has been mutated compared to wild-type, using the EU numbering system based on human IGHG. For example, the L residue at position 309, the Q residue at 311 and the N residues at 434 can be mutated to D, H and S respectively (i.e. L309D; Q311H and N434S). The mutated Fc domain can comprise the following sequence:

(SEQ ID NO: 100)
PKSCDKTHTCPPCPAPELLGGPSVFLFPPKPKDTLMISRTPEVTCVVVD
VSHEDPEVKFNWYVDGVEVHNAKTKPREEQYNSTYRVVSVLTVDHHDWL
NGKEYKCKVSNKALPAPIEKTISKAKGQPREPQVYTLPPSRDELTKNQV
SLTCLVKGFYPSDIAVEWESNGQPENNYKTTPPVLDSDGSFFLYSKLTV
DKSRWQQGNVFSCSVMHEALHSHYTQKSLSLSPGK.

[0165] In other embodiments, the M residue at position 428 and the N residue at 434 can be mutated to L and S respectively (i.e. M428L and N434S). The mutated Fc domain can comprise the following sequence:

(SEQ ID NO: 101)
PKSCDKTHTCPPCPAPELLGGPSVFLFPPKPKDTLMISRTPEVTCVVVD
VSHEDPEVKFNWYVDGVEVHNAKTKPREEQYNSTYRVVSVLTVLHQDWL
NGKEYKCKVSNKALPAPIEKTISKAKGQPREPQVYTLPPSRDELTKNQV
SLTCLVKGFYPSDIAVEWESNGQPENNYKTTPPVLDSDGSFFLYSKLTV
DKSRWQQGNVFSCSVLHEALHSHYTQKSLSLSPGK.

[0166] In other embodiments, the M residue at position 252, the S residue at 254 and the T residue at 256 can be mutated to Y, T and E respectively (i.e. M252Y, S254T and T256E). The mutated Fc domain can comprise the following sequence:

(SEQ ID NO: 102)
PKSCDKTHTCPPCPAPELLGGPSVFLFPPKPKDTLYITREPEVTCVVVD
VSHEDPEVKFNWYVDGVEVHNAKTKPREEQYNSTYRVVSVLTVLHQDWL
NGKEYKCKVSNKALPAPIEKTISKAKGQPREPQVYTLPPSRDELTKNQV
SLTCLVKGFYPSDIAVEWESNGQPENNYKTTPPVLDSDGSFFLYSKLTV
DKSRWQQGNVFSCSVMHEALHNHYTQKSLSLSPGK.

[0167] In other embodiments, the H residue at position 433 and the N residue at 434 can be mutated to K and F respectively (i.e. H433K and N434F). The mutated Fc domain can comprise the following sequence:

(SEQ ID NO: 103)
PKSCDKTHTCPPCPAPELLGGPSVFLFPPKPKDTLMISRTPEVTCVVVD
VSHEDPEVKFNWYVDGVEVHNAKTKPREEQYNSTYRVVSVLTVLHQDWL
NGKEYKCKVSNKALPAPIEKTISKAKGQPREPQVYTLPPSRDELTKNQV
SLTCLVKGFYPSDIAVEWESNGQPENNYKTTPPVLDSDGSFFLYSKLTV
DKSRWQQGNVFSCSVMHEALKFHYTQKSLSLSPGK.

[0168] Accordingly, the invention also provides an optimized nucleotide sequence that encodes an antigenic fragment of the SARS-COV-2 S protein, or an antigenic fragment thereof, operably linked with an N-terminal signal peptide and a C-terminal Fc domain. The Fc can have the amino acid sequence of SEQ ID NO: 100, SEQ ID NO: 101, SEQ ID NO: 102 or SEQ ID NO: 103. The signal peptide can have the amino acid sequence of SEQ ID NO:7. In particular embodiments, the antigenic fragment is the RBD of the SARS-COV-2 S protein.

[0169] In some embodiments, the invention provides an optimized nucleotide sequence that encodes an amino acid sequence comprising the RBD of the SARS-COV-2 S protein operably linked with an N-terminal signal peptide and a C-terminal mutated Fc domain, which has an amino acid sequence comprising SEQ ID NO:104. In one embodiment, the optimized nucleotide sequence has the sequence of SEQ ID NO: 105. In other embodiments, the optimized nucleotide sequence is at least 60%, 65%, 70%, 75%, 80%, 85%, 90%, 95%, 96%, 97%, 98%, or 99% identical to SEQ ID NO: 105 and encodes the amino acid sequence of SEQ ID NO: 104.

[0170] In some embodiments, the invention provides an optimized nucleotide sequence that encodes an amino acid sequence comprising the RBD of the SARS-COV-2 S protein operably linked with an N-terminal signal peptide and a C-terminal mutated Fc domain, which has an amino acid sequence comprising SEQ ID NO: 106. In one embodiment, the optimized nucleotide sequence has the sequence of SEQ ID NO: 107. In other embodiments, the optimized nucleotide sequence is at least 60%, 65%, 70%, 75%, 80%, 85%, 90%, 95%, 96%, 97%, 98%, or 99% identical to SEQ ID NO: 107 and encodes the amino acid sequence of SEQ ID NO: 106.

[0171] In some embodiments, the invention provides an optimized nucleotide sequence that encodes an amino acid sequence comprising the RBD of the SARS-COV-2 S protein operably linked with an N-terminal signal peptide and a C-terminal mutated Fc domain, which has an amino acid sequence comprising SEQ ID NO: 108. In one embodiment, the optimized nucleotide sequence has the sequence of SEQ ID NO: 109. In other embodiments, the optimized nucleotide sequence is at least 60%, 65%, 70%, 75%, 80%, 85%, 90%, 95%, 96%, 97%, 98%, or 99% identical to SEQ ID NO: 109 and encodes the amino acid sequence of SEQ ID NO: 108.

[0172] In some embodiments, the invention provides an optimized nucleotide sequence that encodes an amino acid sequence comprising the RBD of the SARS-COV-2 S protein operably linked with an N-terminal signal peptide and a C-terminal mutated Fc domain, which has an amino acid sequence comprising SEQ ID NO: 110. In one embodiment, the optimized nucleotide sequence has the sequence of SEQ ID NO: 111. In other embodiments, the optimized nucleotide sequence is at least 60%, 65%, 70%, 75%, 80%, 85%, 90%, 95%, 96%, 97%, 98%, or 99% identical to SEQ ID NO: 111 and encodes the amino acid sequence of SEQ ID NO: 110.

[0173] Coronaviruses assemble at and bud into the lumen of the endoplasmic reticulum (ER)-Golgi intermediate compartment (ERGIC). The cytoplasmic tail of the SARS-COV-2 S protein contains an ER retrieval signal (ERRS) that can move the S protein from the Golgi to the ER. This process is thought to accumulate S proteins at the ERGIC, which facilitates S protein incorporation into viral particles. The ER retrieval signal in the SARS COV S protein is a dibasic motif (KxHxx) in the cytoplasmic tail, which is similar to a canonical dilysine ER retrieval signal (McBride et al (2007) Journal Of Virology, 81, 5, 2418-2428).

[0174] Mutating the ER retrieval signal may prevent the virus from forming viral particles. Without wishing to be bound by any particular theory, the inventors believe that it is advantageous to remove the ER retrieval signals from SARS-COV-2 S proteins that are intended for the inclusion in a vaccine. Therefore, in some embodiments, an optimized nucleotide sequence according to the present invention may encode a prefusion stabilized SARS-COV-2 S protein, a prefusion stabilized ectodomain of the SARS-COV-2 S protein, or an antigenic fragment of either, which has been modified relative to naturally occurring SARS-COV-2 S protein by mutating the ER retrieval signal. For example, the KLHYT ER retrieval signal of the SARS-COV-2 S protein can be removed by mutating resides 1268 and 1270 to alanine (i.e., ALAYT).

[0175] In some embodiments, an optimized nucleotide sequence according to the present invention may encode a prefusion stabilized SARS-COV-2 S protein, a prefusion stabilized ectodomain of the SARS-COV-2 S protein, or an antigenic fragment of either, which has been modified relative to naturally occurring SARS-COV-2 S protein by removing the furin cleavage site required for activation, by mutating residues 986 and 987 to proline and by removing the ER retrieval signal. For example, an optimized nucleotide sequence may encode a prefusion stabilized SARS-COV-2 S protein, which has an amino acid sequence comprising SEQ ID NO: 125. In one embodiment, the optimized nucleotide sequence has the sequence of SEQ ID NO: 124. In other embodiments, the optimized nucleotide sequence is at least 60%, 65%, 70%, 75%, 80%, 85%, 90%, 95%, 96%, 97%, 98%, or 99% identical to SEQ ID NO: 124 and encodes the amino acid sequence of SEQ ID NO: 125.

[0176] In some embodiments, an optimized nucleotide sequence according to the present invention may encode a prefusion stabilized SARS-COV-2 S protein, a prefusion stabilized ectodomain of the SARS-COV-2 S protein, or an antigenic fragment of either, which has been modified relative to naturally occurring SARS-COV-2 S protein by removing the furin cleavage site required for activation, by mutating residues 986 and 987 to proline, by removing the ER retrieval signal and which contains an extended N-terminal signal peptide. For example, an optimized nucleotide sequence may encode a prefusion stabilized SARS-COV-2 S protein, which has an amino acid sequence comprising SEQ ID NO: 127. In one embodiment, the optimized nucleotide sequence has the sequence of SEQ ID NO: 126. In other embodiments, the optimized nucleotide sequence is at least 60%, 65%, 70%, 75%, 80%, 85%, 90%, 95%, 96%, 97%, 98%, or 99% identical to SEQ ID NO: 126 and encodes the amino acid sequence of SEQ ID NO: 127.

[0177] In some embodiments, an optimized nucleotide sequence according to the present invention may encode a prefusion stabilized SARS-COV-2 S protein, a prefusion stabilized ectodomain of the SARS-COV-2 S protein, or an antigenic fragment of either, which has been modified relative to naturally occurring SARS-COV-2 S protein by removing the furin cleavage site required for activation, by mutating residues 817, 892, 899, 942, 986 and 987 to proline and by removing the ER retrieval signal. For example, an optimized nucleotide sequence may encode a prefusion stabilized SARS-COV-2 S protein, which has an amino acid sequence comprising SEQ ID NO: 139. In one embodiment, the optimized nucleotide sequence has the sequence of SEQ ID NO: 138. In other embodiments, the optimized nucleotide sequence is at least 60%, 65%, 70%, 75%, 80%, 85%, 90%, 95%, 96%, 97%, 98%, or 99% identical to SEQ ID NO: 138 and encodes the amino acid sequence of SEQ ID NO: 139.

[0178] In some embodiments, an optimized nucleotide sequence according to the present invention may encode a prefusion stabilized SARS-COV-2 S protein, a prefusion stabilized ectodomain of the SARS-COV-2 S protein, or an antigenic fragment of either, which has been modified relative to naturally occurring SARS-COV-2 S protein by removing the furin cleavage site required for activation, by mutating residues 817, 892, 899, 942, 986 and 987 to proline, by removing the ER retrieval signal and which contains an extended N-terminal signal peptide. For example, an optimized nucleotide sequence may encode a prefusion stabilized SARS-COV-2 S protein, which has an amino acid sequence comprising SEQ ID NO: 141. In one embodiment, the optimized nucleotide sequence has the sequence of SEQ ID NO: 140. In other embodiments, the optimized nucleotide sequence is at least 60%, 65%, 70%, 75%, 80%, 85%, 90%, 95%, 96%, 97%, 98%, or 99% identical to SEQ ID NO: 140 and encodes the amino acid sequence of SEQ ID NO: 141.

[0179] A specific combination of mutations listed in paragraphs 0 and may be introduced in any of the SARS-COV-2 S proteins disclosed herein. For example, in specific embodiments, an optimized nucleotide sequence according to the present invention may encode a prefusion stabilized SARS-COV-2 S protein, a prefusion stabilized ectodomain of the SARS-COV-2 S protein, or an antigenic fragment of either, which has been modified relative to SARS-COV-2 S protein of the index strain from Wuhan (SEQ ID NO: 1) to contain the ΔH69, ΔV70, ΔY144, N501Y, A570D, D614G, P681H, T716I, S982A and D1118H mutations. Accordingly, in certain embodiments, an optimized nucleotide sequence of the invention may encode a prefusion stabilized SARS-COV-2 S protein, which has an amino acid sequence comprising SEQ ID NO: 151. In one embodiment, the optimized nucleotide sequence has the sequence of SEQ ID NO: 150. In other embodiments, the optimized nucleotide sequence is at least 60%, 65%, 70%, 75%, 80%, 85%, 90%, 95%, 96%, 97%, 98%, or 99% identical to SEQ ID NO: 150 and encodes the amino acid sequence of SEQ ID NO: 151.

[0180] In some embodiments, an optimized nucleotide sequence according to the present invention may encode a prefusion stabilized SARS-COV-2 S protein, a prefusion stabilized ectodomain of the SARS-COV-2 S protein, or an antigenic fragment of either, which has been modified relative to SARS-COV-2 S protein of the index strain from Wuhan (SEQ ID NO: 1) by mutating residues 986 and 987 to proline and which contains the ΔH69, ΔV70, ΔY144, N501Y, A570D, D614G, P681H, T716I, S982A and D1118H mutations (UK variant+D614G). Accordingly, in certain embodiments, an optimized nucleotide sequence of the invention may encode a prefusion stabilized SARS-COV-2 S protein, which has an amino acid sequence comprising SEQ ID NO: 153. In one embodiment, the optimized nucleotide sequence has the sequence of SEQ ID NO: 152. In other embodiments, the optimized nucleotide sequence is at least 60%, 65%, 70%, 75%, 80%, 85%, 90%, 95%, 96%, 97%, 98%, or 99% identical to SEQ ID NO: 152 and encodes the amino acid sequence of SEQ ID NO: 153.

[0181] In some embodiments, an optimized nucleotide sequence according to the present invention may encode a prefusion stabilized SARS-COV-2 S protein, a prefusion stabilized ectodomain of the SARS-COV-2 S protein, or an antigenic fragment of either, which has been modified relative to SARS-COV-2 S protein of the index strain from Wuhan (SEQ ID NO: 1) by removing the furin cleavage site required for activation and which contains the ΔH69, ΔV70, ΔY144, N501Y, A570D, D614G, P681H, T716I, S982A and D1118H mutations (UK variant+D614G). Accordingly, in certain embodiments, an optimized nucleotide sequence of the invention may encode a prefusion stabilized SARS-COV-2 S protein, which has an amino acid sequence comprising SEQ ID NO: 155. In one embodiment, the optimized nucleotide sequence has the sequence of SEQ ID NO: 154. In other embodiments, the optimized nucleotide sequence is at least 60%, 65%, 70%, 75%, 80%, 85%, 90%, 95%, 96%, 97%, 98%, or 99% identical to SEQ ID NO: 154 and encodes the amino acid sequence of SEQ ID NO: 155.

[0182] In some embodiments, an optimized nucleotide sequence according to the present invention may encode a prefusion stabilized SARS-COV-2 S protein, a prefusion stabilized ectodomain of the SARS-COV-2 S protein, or an antigenic fragment of either, which has been modified relative to SARS-COV-2 S protein of the index strain from Wuhan (SEQ ID NO: 1) by removing the furin cleavage site required for activation, by mutating residues 986 and 987 to proline and which contains the ΔH69, ΔV70, ΔY144, N501Y, A570D, D614G, P681H, T716I, S982A and D1118H mutations (UK variant+D614G). Accordingly, in certain embodiments, an optimized nucleotide sequence of the invention may encode a prefusion stabilized SARS-COV-2 S protein, which has an amino acid sequence comprising SEQ ID NO: 157. In one embodiment, the optimized nucleotide sequence has the sequence of SEQ ID NO: 156. In other embodiments, the optimized nucleotide sequence is at least 60%, 65%, 70%, 75%, 80%, 85%, 90%, 95%, 96%, 97%, 98%, or 99% identical to SEQ ID NO: 156 and encodes the amino acid sequence of SEQ ID NO: 157.

[0183] In some embodiments, an optimized nucleotide sequence according to the present invention may encode a prefusion stabilized SARS-COV-2 S protein, a prefusion stabilized ectodomain of the SARS-COV-2 S protein, or an antigenic fragment of either, which has been modified relative to SARS-COV-2 S protein of the index strain from Wuhan (SEQ ID NO: 1) by removing the furin cleavage site required for activation, by mutating residues 817, 892, 899 and 942, 986 and 987 to proline and which contains the H69, ΔV70, ΔΥ144, N501Y, A570D, D614G, P681H, T716I, S982A and D1118H mutations (UK variant+D614G). Accordingly, in certain embodiments, an optimized nucleotide sequence of the invention may encode a prefusion stabilized SARS-COV-2 S protein, which has an amino acid sequence comprising SEQ ID NO: 159. In one embodiment, the optimized nucleotide sequence has the sequence of SEQ ID NO: 158. In other embodiments, the optimized nucleotide sequence is at least 60%, 65%, 70%, 75%, 80%, 85%, 90%, 95%, 96%, 97%, 98%, or 99% identical to SEQ ID NO: 158 and encodes the amino acid sequence of SEQ ID NO: 159.

[0184] In some embodiments, an optimized nucleotide sequence according to the present invention may encode a prefusion stabilized SARS-COV-2 S protein, a prefusion stabilized ectodomain of the SARS-COV-2 S protein, or an antigenic fragment of either, which has been modified relative to SARS-COV-2 S protein of the index strain from Wuhan (SEQ ID NO: 1) to contain the D80A, D215G, ΔL242, ΔA243, ΔL244, K417N, E484K, N501Y, D614G and A701V mutations (South African variant 1+D614G). Accordingly, in certain embodiments, an optimized nucleotide sequence of the invention may encode a prefusion stabilized SARS-COV-2 S protein, which has an amino acid sequence comprising SEQ ID NO: 161. In one embodiment, the optimized nucleotide sequence has the sequence of SEQ ID NO: 160. In other embodiments, the optimized nucleotide sequence is at least 60%, 65%, 70%, 75%, 80%, 85%, 90%, 95%, 96%, 97%, 98%, or 99% identical to SEQ ID NO: 160 and encodes the amino acid sequence of SEQ ID NO: 161.

[0185] In some embodiments, an optimized nucleotide sequence according to the present invention may encode a prefusion stabilized SARS-COV-2 S protein, a prefusion stabilized ectodomain of the SARS-COV-2 S protein, or an antigenic fragment of either, which has been modified relative to SARS-COV-2 S protein of the index strain from Wuhan (SEQ ID NO: 1) by removing the furin cleavage site required for activation, by mutating residues 986 and 987 to proline and which contains the D80A, D215G, ΔL242, ΔA243, ΔL244, K417N, E484K, N501Y, D614G and A701V mutations (South African variant 1+D614G). Accordingly, in certain embodiments, an optimized nucleotide sequence of the invention may encode a prefusion stabilized SARS-COV-2 S protein, which has an amino acid sequence comprising SEQ ID NO: 163. In one embodiment, the optimized nucleotide sequence has the sequence of SEQ ID NO: 162. In other embodiments, the optimized nucleotide sequence is at least 60%, 65%, 70%, 75%, 80%, 85%, 90%, 95%, 96%, 97%, 98%, or 99% identical to SEQ ID NO: 162 and encodes the amino acid sequence of SEQ ID NO: 163.

[0186] In some embodiments, an optimized nucleotide sequence according to the present invention may encode a prefusion stabilized SARS-COV-2 S protein, a prefusion stabilized ectodomain of the SARS-COV-2 S protein, or an antigenic fragment of either, which has been modified relative to SARS-COV-2 S protein of the index strain from Wuhan (SEQ ID NO: 1) to contain the L18F, D80A, D215G, ΔL242, ΔA243, ΔL244, K417N, E484K, N501Y, D614G and A701V mutations (South African variant 2+D614G). Accordingly, in certain embodiments, an optimized nucleotide sequence of the invention may encode a prefusion stabilized SARS-COV-2 S protein, which has an amino acid sequence comprising SEQ ID NO: 165. In one embodiment, the optimized nucleotide sequence has the sequence of SEQ ID NO: 164. In other embodiments, the optimized nucleotide sequence is at least 60%, 65%, 70%, 75%, 80%, 85%, 90%, 95%, 96%, 97%, 98%, or 99% identical to SEQ ID NO: 164 and encodes the amino acid sequence of SEQ ID NO: 165.

[0187] In some embodiments, an optimized nucleotide sequence according to the present invention may encode a prefusion stabilized SARS-COV-2 S protein, a prefusion stabilized ectodomain of the SARS-COV-2 S protein, or an antigenic fragment of either, which has been modified relative to SARS-COV-2 S protein of the index strain from Wuhan (SEQ ID NO: 1) by removing the furin cleavage site required for activation, by mutating residues 986 and 987 to proline and which contains the L18F, D80A, D215G, ΔL242, ΔA243, ΔL244, K417N, E484K, N501Y, D614G and A701V mutations (South African variant 2+D614G). Accordingly, in certain embodiments, an optimized nucleotide sequence of the invention may encode a prefusion stabilized SARS-COV-2 S protein, which has an amino acid sequence comprising SEQ ID NO: 167. In one embodiment, the optimized nucleotide sequence has the sequence of SEQ ID NO: 166. In other embodiments, the optimized nucleotide sequence is at least 60%, 65%, 70%, 75%, 80%, 85%, 90%, 95%, 96%, 97%, 98%, or 99% identical to SEQ ID NO: 166 and encodes the amino acid sequence of SEQ ID NO: 167.

[0188] In some embodiments, an optimized nucleotide sequence according to the present invention may encode a prefusion stabilized SARS-COV-2 S protein, a prefusion stabilized ectodomain of the SARS-COV-2 S protein, or an antigenic fragment of either, which has been modified relative to SARS-COV-2 S protein of the index strain from Wuhan (SEQ ID NO: 1) to contain the L18F, T20N, P26S, D138Y, R190S, K417T, E484K, N501Y, D614G, H655Y, T1027I and V1176F mutations (Brazilian variant+D614G). Accordingly, in certain embodiments, an optimized nucleotide sequence of the invention may encode a prefusion stabilized SARS-COV-2 S protein, which has an amino acid sequence comprising SEQ ID NO: 169. In one embodiment, the optimized nucleotide sequence has the sequence of SEQ ID NO: 168. In other embodiments, the optimized nucleotide sequence is at least 60%, 65%, 70%, 75%, 80%, 85%, 90%, 95%, 96%, 97%, 98%, or 99% identical to SEQ ID NO: 168 and encodes the amino acid sequence of SEQ ID NO: 169.

[0189] In some embodiments, an optimized nucleotide sequence according to the present invention may encode a prefusion stabilized SARS-COV-2 S protein, a prefusion stabilized ectodomain of the SARS-COV-2 S protein, or an antigenic fragment of either, which has been modified relative to SARS-COV-2 S protein of the index strain from Wuhan (SEQ ID NO: 1) by removing the furin cleavage site required for activation, by mutating residues 986 and 987 to proline and which contains L18F, T20N, P26S, D138Y, R190S, K417T, E484K, N501Y, D614G, H655Y, T1027I and V1176F mutations (Brazilian variant+D614G). Accordingly, in certain embodiments, an optimized nucleotide sequence of the invention may encode a prefusion stabilized SARS-COV-2 S protein, which has an amino acid sequence comprising SEQ ID NO: 171. In one embodiment, the optimized nucleotide sequence has the sequence of SEQ ID NO: 170. In other embodiments, the optimized nucleotide sequence is at least 60%, 65%, 70%, 75%, 80%, 85%, 90%, 95%, 96%, 97%, 98%, or 99% identical to SEQ ID NO: 170 and encodes the amino acid sequence of SEQ ID NO: 171.

### Exemplary Optimized Nucleotide Sequences Encoding a SARS-Cov-2 S Protein and Antigenic Fragments

[0190] An optimized nucleotide sequence according to the present invention may encode a SARS-COV-2 S protein or an antigenic fragment thereof. In one embodiment, the invention provides a nucleic acid comprising an optimized nucleotide sequence encoding a SARS-COV-2 S protein or an antigenic fragment thereof. In some embodiments, the nucleic acid is an mRNA comprising an optimized nucleotide sequence encoding a SARS-COV-2 S protein or an antigenic fragment thereof. In some embodiments, a suitable mRNA sequence comprises a nucleotide sequence encoding a SARS-COV-2 S protein or an antigenic fragment thereof optimized for efficient expression human cells. Exemplary optimized nucleotide sequences encoding a SARS-CoV-2 S protein or an antigenic fragment thereof produced with the process for generating optimized nucleotide sequences in accordance with the invention and their corresponding amino acid sequence are shown in Table 1. Bold residues indicate those amino acids which have been mutated compared to a naturally occurring SARS-COV-2 S protein, underlined residues represent a signal peptide and the residues in italics indicate the presence of an Fc region or a Foldon.

TABLE 1
Exemplary SARS-CoV-2 S sequences.

| | |
|---|---|
| Optimized nucleotide | (SEQ ID NO: 29) |
| sequence encoding a | ATGTTCGTCTTCCTCGTGCTGCTCCCACTCGTTTCTTCCCAG |
| SARS-CoV-2 S protein | TGTGTCAACCTGACAACTAGGACTCAGCTGCCACCAGCCTA |
| | CACCAACTCCTTCACCAGAGGCGTGTATTACCCAGACAAGG |
| | TGTTTAGAAGCAGCGTGCTGCACTCTACCCAGGACCTCTTT |
| | CTGCCCTTTTTCAGCAACGTGACATGGTTTCACGCAATTCA |
| | CGTGTCCGGCACTAATGGCACAAAGCGGTTCGACAATCCA |
| | GTCCTGCCTTTCAACGATGGCGTCTACTTTGCATCTACTGA |
| | GAAATCCAATATCATTAGGGGATGGATCTTCGGCACAACCC |
| | TGGATTCTAAGACCCAGAGCCTGCTGATCGTCAACAACGCC |
| | ACAAACGTGGTCATTAAGGTTTGCGAGTTTCAGTTCTGTAA |
| | CGATCCTTTTCTGGGCGTGTATTATCATAAGAACAATAAGA |
| | GCTGGATGGAGTCCGAGTTTAGAGTGTATAGCTCTGCAAAT |
| | AATTGTACCTTTGAGTACGTGAGCCAGCCCTTTCTGATGGA |
| | CCTGGAGGGAAAACAAGGAAACTTCAAAAACCTGCGGGAA |
| | TTCGTTTTCAAAAACATCGACGGCTATTTCAAGATCTATAG |
| | CAAGCATACCCCAATCAACCTCGTGAGGGACCTCCCCCAG |
| | GGCTTTAGCGCACTGGAGCCACTGGTTGACCTGCCTATCGG |
| | CATTAATATCACAAGATTTCAGACCCTGCTGGCACTGCATA |
| | GAAGCTATCTGACCCCTGGAGACTCCTCTAGTGGGTGGACT |
| | GCCGGCGCCGCTGCCTACTATGTGGGCTATCTGCAGCCACG |
| | GACATTCCTGCTGAAATACAATGAGAACGGGACAATCACA |
| | GATGCTGTTGATTGCGCACTCGACCCCCTGTCCGAGACAAA |
| | GTGCACTCTCAAGAGCTTTACCGTCGAGAAGGGCATCTATC |
| | AGACCTCAAACTTCAGGGTGCAGCCCACAGAATCTATCGTG |
| | CGCTTCCCTAATATCACTAACCTGTGTCCTTTCGGTGAAGT |
| | GTTCAACGCCACCAGGTTTGCTAGCGTGTATGCCTGGAACA |
| | GGAAGAGGATCTCTAACTGCGTCGCCGACTATTCCGTGCTG |
| | TATAACAGCGCCTCCTTCTCCACATTCAAATGCTATGGAGT |
| | GAGCCCGACAAAACTGAACGATCTCTGCTTTACAAATGTCT |
| | ACGCCGACTCTTTTGTGATCAGAGGGGACGAGGTCCGGCA |
| | GATCGCACCAGGACAGACAGGCAAGATTGCTGACTACAAC |
| | TATAAGCTGCCTGACGACTTCACAGGATGTGTGATCGCATG |
| | GAACTCAAACAATCTGGACTCCAAAGTCGGGGGCAACTAT |
| | AATTACCTGTATCGCCTGTTCCGGAAGTCCAACCTGAAGCC |
| | CTTCGAGAGGGACATCAGTACAGAGATCTATCAGGCTGGC |
| | TCCACCCCTTGCAATGGCGTCGAAGGCTTTAATTGTTATTTT |
| | CCCCTGCAGTCTTACGGGTTTCAGCCTACTAATGGAGTTGG |
| | GTACCAGCCATACAGAGTGGTCGTGCTCAGCTTCGAGCTCC |
| | TGCATGCTCCAGCTACAGTTTGCGGGCCAAAGAAGTCCACT |
| | AACCTGGTGAAGAATAAGTGCGTCAACTTCAACTTTAACGG |
| | GCTCACCGGCACCGGCGTGCTGACTGAGAGCAACAAGAAG |
| | TTTCTGCCATTTCAACAGTTTGGACGGGACATTGCCGACAC |
| | CACCGATGCCGTTCGGGATCCACAGACCCTGGAAATTCTGG |
| | ACATTACACCGTGCAGCTTCGGGGGCGTGAGCGTGATCAC |
| | ACCCGGAACCAATACAAGCAACCAGGTTGCCGTCCTGTATC |
| | AGGATGTCAATTGCACAGAAGTGCCAGTTGCTATCCACGCA |
| | GACCAGCTGACTCCCACATGGCGGGTGTATAGCACCGGAT |
| | CCAACGTGTTTCAGACCCGCGCCGGATGTCTCATTGGGGCC |
| | GAGCACGTGAATAACAGCTACGAGTGCGACATCCCCATTG |
| | GCGCCGGCATTTGTGCGTCTTACCAGACTCAGACCAACTCT |
| | CCTAGAAGGGCCAGGTCCGTTGCTAGTCAGTCTATTATTGC |
| | CTATACCATGAGCCTCGGAGCTGAGAATAGCGTGGCCTACT |
| | CCAATAATTCCATCGCAATCCCTACTAACTTCACTATTTCTG |
| | TGACCACCGAGATCCTGCCTGTGTCTATGACTAAGACTAGC |
| | GTTGATTGTACCATGTATATTTGTGGCGACTCTACCGAATG |
| | TTCTAACCTGCTGCTTCAGTACGGCTCATTTTGCACACAGCT |
| | GAACAGAGCCCTGACTGGGATCGCTGTGGAGCAGGACAAG |
| | AACACACAGGAGGTGTTTGCACAGGTGAAGCAGATCTATA |
| | AGACCCCTCCTATTAAGGATTTCGGCGGATTCAATTTCTCA |
| | CAGATTCTGCCAGACCCCAGTAAGCCTTCCAAGAGGAGCTT |
| | CATCGAGGATCTCCTGTTTAACAAGGTGACCCTGGCAGACG |
| | CCGGCTTTATTAAGCAATATGGGGATTGCCTGGGCGACATT |
| | GCTGCCAGAGACCTGATTTGCGCCCAGAAATTCAATGGCCT |
| | CACAGTGCTGCCACCTCTGCTGACCGACGAGATGATCGCTC |
| | AATACACTAGCGCACTGCTGGCCGGAACCATCACATCAGG |
| | CTGGACCTTCGGGGCCGGAGCAGCACTGCAGATTCCATTCG |
| | CCATGCAGATGGCCTATAGATTCAACGGCATTGGCGTCACA |
| | CAGAACGTGCTGTACGAAAACCAGAAGCTCATCGCTAACC |
| | AGTTTAATTCCGCAATTGGAAAGATCCAAGATTCACTCAGC |
| | TCAACCGCCTCTGCACTCGGAAAGCTGCAGGACGTGGTCA |
| | ACCAGAATGCTCAGGCCCTGAACACACTCGTCAAGCAGCT |
| | GTCCTCTAACTTTGGCGCTATCAGCTCCGTTCTGAACGACA |
| | TTCTGAGCCGCCTGGATAAGGTGGAGGCTGAAGTCCAGATT |
| | GACCGCCTGATTACCGGCCGGCTGCAGTCTCTGCAAACATA |
| | CGTGACCCAGCAGCTGATCAGAGCAGCCGAGATCCGGGCA |
| | TCCGCAAATCTGGCAGCAACTAAGATGAGCGAATGCGTGC |
| | TGGGCCAGTCCAAGCGGGTGGACTTTTGTGGCAAGGGCTA |
| | CCACCTGATGAGCTTCCCCCAGAGCGCCCCACATGGCGTTG |
| | TTTTTCTGCACGTGACCTATGTCCCTGCTCAGGAAAAGAAC |
| | TTTACAACTGCTCCTGCTATCTGCCATGACGGCAAGGCCCA |
| | CTTCCCACGGGAGGGAGTGTTTGTGTCCAATGGCACACACT |
| | GGTTCGTGACCCAGAGGAACTTCTATGAACCCCAGATCATC |
| | ACCACTGACAATACCTTCGTGTCTGGAAATTGCGACGTCGT |
| | GATCGGCATCGTTAACAACACCGTGTACGACCCTCTCCAGC |
| | CAGAGCTGGACTCCTTTAAGGAGGAACTGGATAAGTATTTT |
| | AAGAACCACACAAGCCCAGATGTGGATCTCGGGGACATCT |
| | CCGGAATTAACGCCTCCGTGGTGAATATCCAGAAGGAGAT |
| | TGACCGCCTAAATGAAGTTGCCAAGAACCTCAATGAGTCTC |
| | TGATTGATCTGCAGGAACTGGGCAAGTATGAGCAGTATATC |
| | AAATGGCCCTGGTACATTTGGCTGGGGTTTATCGCCGGACT |
| | GATTGCCATCGTCATGGTGACCATCATGCTGTGTTGCATGA |
| | CCTCCTGTTGTTCCTGTCTGAAGGGCTGCTGTAGTTGCGGCT |
| | CTTGCTGTAAATTCGACGAAGATGATAGCGAGCCCGTGCTG |
| | AAGGGCGTGAAGCTGCATTATACCTGA |
| SARS-CoV-2 S protein | (SEQ ID NO: 1) |
| sequence | MFVFLVLLPLVSSQCVNLTTRTQLPPAYTNSFTRGVYYPDKVF |
| | RSSVLHSTQDLFLPFFSNVTWFHAIHVSGTNGTKRFDNPVLPF |
| | NDGVYFASTEKSNIIRGWIFGTTLDSKTQSLLIVNNATNVVIKV |
| | CEFQFCNDPFLGVYYHKNNKSWMESEFRVYSSANNCTFEYVS |
| | QPFLMDLEGKQGNFKNLREFVFKNIDGYFKIYSKHTPINLVRD |
| | LPQGFSALEPLVDLPIGINITRFQTLLALHRSYLTPGDSSSGWT |
| | AGAAAYYVGYLQPRTFLLKYNENGTITDAVDCALDPLSETKC |
| | TLKSFTVEKGIYQTSNFRVQPTESIVRFPNITNLCPFGEVFNATR |
| | FASVYAWNRKRISNCVADYSVLYNSASFSTFKCYGVSPTKLN |
| | DLCFTNVYADSFVIRGDEVRQIAPGQTGKIADYNYKLPDDFTG |
| | CVIAWNSNNLDSKVGGNYNYLYRLFRKSNLKPFERDISTEIYQ |
| | AGSTPCNGVEGFNCYFPLQSYGFQPTNGVGYQPYRVVVLSFE |
| | LLHAPATVCGPKKSTNLVKNKCVNFNFNGLTGTGVLTESNKK |
| | FLPFQQFGRDIADTTDAVRDPQTLEILDITPCSFGGVSVITPGTN |
| | TSNQVAVLYQDVNCTEVPVAIHADQLTPTWRVYSTGSNVFQT |
| | RAGCLIGAEHVNNSYECDIPIGAGICASYQTQTNSPRRARSVA |
| | SQSIIAYTMSLGAENSVAYSNNSIAIPTNFTISVTTEILPVSMTK |
| | TSVDCTMYICGDSTECSNLLLQYGSFCTQLNRALTGIAVEQDK |
| | NTQEVFAQVKQIYKTPPIKDFGGFNFSQILPDPSKPSKRSFIEDL |
| | LFNKVTLADAGFIKQYGDCLGDIAARDLICAQKFNGLTVLPPL |
| | LTDEMIAQYTSALLAGTITSGWTFGAGAALQIPFAMQMAYRF |
| | NGIGVTQNVLYENQKLIANQFNSAIGKIQDSLSSTASALGKLQ |
| | DVVNQNAQALNTLVKQLSSNFGAISSVLNDILSRLDKVEAEV |
| | QIDRLITGRLQSLQTYVTQQLIRAAEIRASANLAATKMSECVL |
| | GQSKRVDFCGKGYHLMSFPQSAPHGVVFLHVTYVPAQEKNF |
| | TTAPAICHDGKAHFPREGVFVSNGTHWFVTQRNFYEPQIITTD |
| | NTFVSGNCDVVIGIVNNTVYDPLQPELDSFKEELDKYFKNHTS |
| | PDVDLGDISGINASVVNIQKEIDRLNEVAKNLNESLIDLQELGK |
| | YEQYIKWPWYIWLGFIAGLIAIVMVTIMLCCMTSCCSCLKGCC |
| | SCGSCCKFDEDDSEPVLKGVKLHYT |
| Optimized nucleotide | (SEQ ID NO: 30) |
| sequence encoding the | ATGTTCGTCTTCCTCGTGCTGCTCCCACTCGTTTCTTCCCAG |
| ectodomain of a SARS- | TGTGTCAACCTGACAACTAGGACTCAGCTGCCACCAGCCTA |
| CoV-2 S protein | CACCAACTCCTTCACCAGAGGCGTGTATTACCCAGACAAGG |
| | TGTTTAGAAGCAGCGTGCTGCACTCTACCCAGGACCTCTTT |
| | CTGCCCTTTTTCAGCAACGTGACATGGTTTCACGCAATTCA |
| | CGTGTCCGGCACTAATGGCACAAAGCGGTTCGACAATCCA |
| | GTCCTGCCTTTCAACGATGGCGTCTACTTTGCATCTACTGA |
| | GAAATCCAATATCATTAGGGGATGGATCTTCGGCACAACCC |
| | TGGATTCTAAGACCCAGAGCCTGCTGATCGTCAACAACGCC |
| | ACAAACGTGGTCATTAAGGTTTGCGAGTTTCAGTTCTGTAA |
| | CGATCCTTTTCTGGGCGTGTATTATCATAAGAACAATAAGA |
| | GCTGGATGGAGTCCGAGTTTAGAGTGTATAGCTCTGCAAAT |
| | AATTGTACCTTTGAGTACGTGAGCCAGCCCTTTCTGATGGA |
| | CCTGGAGGGAAAACAAGGAAACTTCAAAAACCTGCGGGAA |
| | TTCGTTTTCAAAAACATCGACGGCTATTTCAAGATCTATAG |
| | CAAGCATACCCCAATCAACCTCGTGAGGGACCTCCCCCAG |
| | GGCTTTAGCGCACTGGAGCCACTGGTTGACCTGCCTATCGG |
| | CATTAATATCACAAGATTTCAGACCCTGCTGGCACTGCATA |
| | GAAGCTATCTGACCCCTGGAGACTCCTCTAGTGGGTGGACT |
| | GCCGGCGCCGCTGCCTACTATGTGGGCTATCTGCAGCCACG |
| | GACATTCCTGCTGAAATACAATGAGAACGGGACAATCACA |
| | GATGCTGTTGATTGCGCACTCGACCCCCTGTCCGAGACAAA |
| | GTGCACTCTCAAGAGCTTTACCGTCGAGAAGGGCATCTATC |
| | AGACCTCAAACTTCAGGGTGCAGCCCACAGAATCTATCGTG |
| | CGCTTCCCTAATATCACTAACCTGTGTCCTTTCGGTGAAGT |
| | GTTCAACGCCACCAGGTTTGCTAGCGTGTATGCCTGGAACA |
| | GGAAGAGGATCTCTAACTGCGTCGCCGACTATTCCGTGCTG |
| | TATAACAGCGCCTCCTTCTCCACATTCAAATGCTATGGAGT |
| | GAGCCCGACAAAACTGAACGATCTCTGCTTTACAAATGTCT |
| | ACGCCGACTCTTTTGTGATCAGAGGGGACGAGGTCCGGCA |
| | GATCGCACCAGGACAGACAGGCAAGATTGCTGACTACAAC |
| | TATAAGCTGCCTGACGACTTCACAGGATGTGTGATCGCATG |
| | GAACTCAAACAATCTGGACTCCAAAGTCGGGGGCAACTAT |
| | AATTACCTGTATCGCCTGTTCCGGAAGTCCAACCTGAAGCC |
| | CTTCGAGAGGGACATCAGTACAGAGATCTATCAGGCTGGC |
| | TCCACCCCTTGCAATGGCGTCGAAGGCTTTAATTGTTATTTT |
| | CCCCTGCAGTCTTACGGGTTTCAGCCTACTAATGGAGTTGG |
| | GTACCAGCCATACAGAGTGGTCGTGCTCAGCTTCGAGCTCC |
| | TGCATGCTCCAGCTACAGTTTGCGGGCCAAAGAAGTCCACT |
| | AACCTGGTGAAGAATAAGTGCGTCAACTTCAACTTTAACGG |
| | GCTCACCGGCACCGGCGTGCTGACTGAGAGCAACAAGAAG |
| | TTTCTGCCATTTCAACAGTTTGGACGGGACATTGCCGACAC |
| | CACCGATGCCGTTCGGGATCCACAGACCCTGGAAATTCTGG |
| | ACATTACACCGTGCAGCTTCGGGGGCGTGAGCGTGATCAC |
| | ACCCGGAACCAATACAAGCAACCAGGTTGCCGTCCTGTATC |
| | AGGATGTCAATTGCACAGAAGTGCCAGTTGCTATCCACGCA |
| | GACCAGCTGACTCCCACATGGCGGGTGTATAGCACCGGAT |
| | CCAACGTGTTTCAGACCCGCGCCGGATGTCTCATTGGGGCC |
| | GAGCACGTGAATAACAGCTACGAGTGCGACATCCCCATTG |
| | GCGCCGGCATTTGTGCGTCTTACCAGACTCAGACCAACTCT |
| | CCTAGAAGGGCCAGGTCCGTTGCTAGTCAGTCTATTATTGC |
| | CTATACCATGAGCCTCGGAGCTGAGAATAGCGTGGCCTACT |
| | CCAATAATTCCATCGCAATCCCTACTAACTTCACTATTTCTG |
| | TGACCACCGAGATCCTGCCTGTGTCTATGACTAAGACTAGC |
| | GTTGATTGTACCATGTATATTTGTGGCGACTCTACCGAATG |
| | TTCTAACCTGCTGCTTCAGTACGGCTCATTTTGCACACAGCT |
| | GAACAGAGCCCTGACTGGGATCGCTGTGGAGCAGGACAAG |
| | AACACACAGGAGGTGTTTGCACAGGTGAAGCAGATCTATA |
| | AGACCCCTCCTATTAAGGATTTCGGCGGATTCAATTTCTCA |
| | CAGATTCTGCCAGACCCCAGTAAGCCTTCCAAGAGGAGCTT |
| | CATCGAGGATCTCCTGTTTAACAAGGTGACCCTGGCAGACG |
| | CCGGCTTTATTAAGCAATATGGGGATTGCCTGGGCGACATT |
| | GCTGCCAGAGACCTGATTTGCGCCCAGAAATTCAATGGCCT |
| | CACAGTGCTGCCACCTCTGCTGACCGACGAGATGATCGCTC |
| | AATACACTAGCGCACTGCTGGCCGGAACCATCACATCAGG |
| | CTGGACCTTCGGGGCCGGAGCAGCACTGCAGATTCCATTCG |
| | CCATGCAGATGGCCTATAGATTCAACGGCATTGGCGTCACA |
| | CAGAACGTGCTGTACGAAAACCAGAAGCTCATCGCTAACC |
| | AGTTTAATTCCGCAATTGGAAAGATCCAAGATTCACTCAGC |
| | TCAACCGCCTCTGCACTCGGAAAGCTGCAGGACGTGGTCA |
| | ACCAGAATGCTCAGGCCCTGAACACACTCGTCAAGCAGCT |
| | GTCCTCTAACTTTGGCGCTATCAGCTCCGTTCTGAACGACA |
| | TTCTGAGCCGCCTGGATAAGGTGGAGGCTGAAGTCCAGATT |
| | GACCGCCTGATTACCGGCCGGCTGCAGTCTCTGCAAACATA |
| | CGTGACCCAGCAGCTGATCAGAGCAGCCGAGATCCGGGCA |
| | TCCGCAAATCTGGCAGCAACTAAGATGAGCGAATGCGTGC |
| | TGGGCCAGTCCAAGCGGGTGGACTTTTGTGGCAAGGGCTA |
| | CCACCTGATGAGCTTCCCCCAGAGCGCCCCACATGGCGTTG |
| | TTTTTCTGCACGTGACCTATGTCCCTGCTCAGGAAAAGAAC |
| | TTTACAACTGCTCCTGCTATCTGCCATGACGGCAAGGCCCA |
| | CTTCCCACGGGAGGGAGTGTTTGTGTCCAATGGCACACACT |
| | GGTTCGTGACCCAGAGGAACTTCTATGAACCCCAGATCATC |
| | ACCACTGACAATACCTTCGTGTCTGGAAATTGCGACGTCGT |
| | GATCGGCATCGTTAACAACACCGTGTACGACCCTCTCCAGC |
| | CAGAGCTGGACTCCTTTAAGGAGGAACTGGATAAGTATTTT |
| | AAGAACCACACAAGCCCAGATGTGGATCTCGGGGACATCT |
| | CCGGAATTAACGCCTCCGTGGTGAATATCCAGAAGGAGAT |
| | TGACCGCCTAAATGAAGTTGCCAAGAACCTCAATGAGTCTC |
| | TGATTGATCTGCAGGAACTGGGCAAGTATGAGCAGTGA |
| Ectodomain of a SARS- | (SEQ ID NO: 2) |
| CoV-2 S protein | MFVFLVLLPLVSSQCVNLTTRTQLPPAYTNSFTRGVYYPDKVF |
| | RSSVLHSTQDLFLPFFSNVTWFHAIHVSGTNGTKRFDNPVLPF |
| | NDGVYFASTEKSNIIRGWIFGTTLDSKTQSLLIVNNATNVVIKV |
| | CEFQFCNDPFLGVYYHKNNKSWMESEFRVYSSANNCTFEYVS |
| | QPFLMDLEGKQGNFKNLREFVFKNIDGYFKIYSKHTPINLVRD |
| | LPQGFSALEPLVDLPIGINITRFQTLLALHRSYLTPGDSSSGWT |
| | AGAAAYYVGYLQPRTFLLKYNENGTITDAVDCALDPLSETKC |
| | TLKSFTVEKGIYQTSNFRVQPTESIVRFPNITNLCPFGEVFNATR |
| | FASVYAWNRKRISNCVADYSVLYNSASFSTFKCYGVSPTKLN |
| | DLCFTNVYADSFVIRGDEVRQIAPGQTGKIADYNYKLPDDFTG |
| | CVIAWNSNNLDSKVGGNYNYLYRLFRKSNLKPFERDISTEIYQ |
| | AGSTPCNGVEGFNCYFPLQSYGFQPTNGVGYQPYRVVVLSFE |
| | LLHAPATVCGPKKSTNLVKNKCVNFNFNGLTGTGVLTESNKK |
| | FLPFQQFGRDIADTTDAVRDPQTLEILDITPCSFGGVSVITPGTN |
| | TSNQVAVLYQDVNCTEVPVAIHADQLTPTWRVYSTGSNVFQT |
| | RAGCLIGAEHVNNSYECDIPIGAGICASYQTQTNSPRRARSVA |
| | SQSIIAYTMSLGAENSVAYSNNSIAIPTNFTISVTTEILPVSMTK |
| | TSVDCTMYICGDSTECSNLLLQYGSFCTQLNRALTGIAVEQDK |
| | NTQEVFAQVKQIYKTPPIKDFGGFNFSQILPDPSKPSKRSFIEDL |
| | LFNKVTLADAGFIKQYGDCLGDIAARDLICAQKFNGLTVLPPL |
| | LTDEMIAQYTSALLAGTITSGWTFGAGAALQIPFAMQMAYRF |
| | NGIGVTQNVLYENQKLIANQFNSAIGKIQDSLSSTASALGKLQ |
| | DVVNQNAQALNTLVKQLSSNFGAISSVLNDILSRLDKVEAEV |
| | QIDRLITGRLQSLQTYVTQQLIRAAEIRASANLAATKMSECVL |
| | GQSKRVDFCGKGYHLMSFPQSAPHGVVFLHVTYVPAQEKNF |
| | TTAPAICHDGKAHFPREGVFVSNGTHWFVTQRNFYEPQIITTD |
| | NTFVSGNCDVVIGIVNNTVYDPLQPELDSFKEELDKYFKNHTS |
| | PDVDLGDISGINASVVNIQKEIDRLNEVAKNLNESLIDLQELGK |
| | YEQ |
| Optimized nucleotide | (SEQ ID NO: 31) |
| sequence encoding the | ATGTTCGTCTTCCTCGTGCTGCTCCCACTCGTTTCTTCCCAG |
| S1 subunit of a SARS- | TGTGTCAACCTGACAACTAGGACTCAGCTGCCACCAGCCTA |
| CoV-2 S protein | CACCAACTCCTTCACCAGAGGCGTGTATTACCCAGACAAGG |
| | TGTTTAGAAGCAGCGTGCTGCACTCTACCCAGGACCTCTTT |
| | CTGCCCTTTTTCAGCAACGTGACATGGTTTCACGCAATTCA |
| | CGTGTCCGGCACTAATGGCACAAAGCGGTTCGACAATCCA |
| | GTCCTGCCTTTCAACGATGGCGTCTACTTTGCATCTACTGA |
| | GAAATCCAATATCATTAGGGGATGGATCTTCGGCACAACCC |
| | TGGATTCTAAGACCCAGAGCCTGCTGATCGTCAACAACGCC |
| | ACAAACGTGGTCATTAAGGTTTGCGAGTTTCAGTTCTGTAA |
| | CGATCCTTTTCTGGGCGTGTATTATCATAAGAACAATAAGA |
| | GCTGGATGGAGTCCGAGTTTAGAGTGTATAGCTCTGCAAAT |
| | AATTGTACCTTTGAGTACGTGAGCCAGCCCTTTCTGATGGA |
| | CCTGGAGGGAAAACAAGGAAACTTCAAAAACCTGCGGGAA |
| | TTCGTTTTCAAAAACATCGACGGCTATTTCAAGATCTATAG |
| | CAAGCATACCCCAATCAACCTCGTGAGGGACCTCCCCCAG |
| | GGCTTTAGCGCACTGGAGCCACTGGTTGACCTGCCTATCGG |
| | CATTAATATCACAAGATTTCAGACCCTGCTGGCACTGCATA |
| | GAAGCTATCTGACCCCTGGAGACTCCTCTAGTGGGTGGACT |
| | GCCGGCGCCGCTGCCTACTATGTGGGCTATCTGCAGCCACG |
| | GACATTCCTGCTGAAATACAATGAGAACGGGACAATCACA |
| | GATGCTGTTGATTGCGCACTCGACCCCCTGTCCGAGACAAA |
| | GTGCACTCTCAAGAGCTTTACCGTCGAGAAGGGCATCTATC |
| | AGACCTCAAACTTCAGGGTGCAGCCCACAGAATCTATCGTG |
| | CGCTTCCCTAATATCACTAACCTGTGTCCTTTCGGTGAAGT |
| | GTTCAACGCCACCAGGTTTGCTAGCGTGTATGCCTGGAACA |
| | GGAAGAGGATCTCTAACTGCGTCGCCGACTATTCCGTGCTG |
| | TATAACAGCGCCTCCTTCTCCACATTCAAATGCTATGGAGT |
| | GAGCCCGACAAAACTGAACGATCTCTGCTTTACAAATGTCT |
| | ACGCCGACTCTTTTGTGATCAGAGGGGACGAGGTCCGGCA |
| | GATCGCACCAGGACAGACAGGCAAGATTGCTGACTACAAC |
| | TATAAGCTGCCTGACGACTTCACAGGATGTGTGATCGCATG |
| | GAACTCAAACAATCTGGACTCCAAAGTCGGGGGCAACTAT |
| | AATTACCTGTATCGCCTGTTCCGGAAGTCCAACCTGAAGCC |
| | CTTCGAGAGGGACATCAGTACAGAGATCTATCAGGCTGGC |
| | TCCACCCCTTGCAATGGCGTCGAAGGCTTTAATTGTTATTTT |
| | CCCCTGCAGTCTTACGGGTTTCAGCCTACTAATGGAGTTGG |
| | GTACCAGCCATACAGAGTGGTCGTGCTCAGCTTCGAGCTCC |
| | TGCATGCTCCAGCTACAGTTTGCGGGCCAAAGAAGTCCACT |
| | AACCTGGTGAAGAATAAGTGCGTCAACTTCAACTTTAACGG |
| | GCTCACCGGCACCGGCGTGCTGACTGAGAGCAACAAGAAG |
| | TTTCTGCCATTTCAACAGTTTGGACGGGACATTGCCGACAC |
| | CACCGATGCCGTTCGGGATCCACAGACCCTGGAAATTCTGG |
| | ACATTACACCGTGCAGCTTCGGGGGCGTGAGCGTGATCAC |
| | ACCCGGAACCAATACAAGCAACCAGGTTGCCGTCCTGTATC |
| | AGGATGTCAATTGCACAGAAGTGCCAGTTGCTATCCACGCA |
| | GACCAGCTGACTCCCACATGGCGGGTGTATAGCACCGGAT |
| | CCAACGTGTTTCAGACCCGCGCCGGATGTCTCATTGGGGCC |
| | GAGCACGTGAATAACAGCTACGAGTGCGACATCCCCATTG |
| | GCGCCGGCATTTGTGCGTCTTACCAGACTCAGACCAACTCT |
| | CCTTGA |
| S1 subunit of a SARS- | (SEQ ID NO: 3) |
| CoV-2 S protein | MFVFLVLLPLVSSQCVNLTTRTQLPPAYTNSFTRGVYYPDKVF |
| | RSSVLHSTQDLFLPFFSNVTWFHAIHVSGTNGTKRFDNPVLPF |
| | NDGVYFASTEKSNIIRGWIFGTTLDSKTQSLLIVNNATNVVIKV |
| | CEFQFCNDPFLGVYYHKNNKSWMESEFRVYSSANNCTFEYVS |
| | QPFLMDLEGKQGNFKNLREFVFKNIDGYFKIYSKHTPINLVRD |
| | LPQGFSALEPLVDLPIGINITRFQTLLALHRSYLTPGDSSSGWT |
| | AGAAAYYVGYLQPRTFLLKYNENGTITDAVDCALDPLSETKC |
| | TLKSFTVEKGIYQTSNFRVQPTESIVRFPNITNLCPFGEVFNATR |
| | FASVYAWNRKRISNCVADYSVLYNSASFSTFKCYGVSPTKLN |
| | DLCFTNVYADSFVIRGDEVRQIAPGQTGKIADYNYKLPDDFTG |
| | CVIAWNSNNLDSKVGGNYNYLYRLFRKSNLKPFERDISTEIYQ |
| | AGSTPCNGVEGFNCYFPLQSYGFQPTNGVGYQPYRVVVLSFE |
| | LLHAPATVCGPKKSTNLVKNKCVNFNFNGLTGTGVLTESNKK |
| | FLPFQQFGRDIADTTDAVRDPQTLEILDITPCSFGGVSVITPGTN |
| | TSNQVAVLYQDVNCTEVPVAIHADQLTPTWRVYSTGSNVFQT |
| | RAGCLIGAEHVNNSYECDIPIGAGICASYQTQTNSP |
| Optimized nucleotide | (SEQ ID NO: 32) |
| sequence encoding the | ATGTCCGTTGCTAGTCAGTCTATTATTGCCTATACCATGAG |
| subunit of a SARS-CoV- | CCTCGGAGCTGAGAATAGCGTGGCCTACTCCAATAATTCCA |
| 2 S protein | TCGCAATCCCTACTAACTTCACTATTTCTGTGACCACCGAG |
| | ATCCTGCCTGTGTCTATGACTAAGACTAGCGTTGATTGTAC |
| | CATGTATATTTGTGGCGACTCTACCGAATGTTCTAACCTGC |
| | TGCTTCAGTACGGCTCATTTTGCACACAGCTGAACAGAGCC |
| | CTGACTGGGATCGCTGTGGAGCAGGACAAGAACACACAGG |
| | AGGTGTTTGCACAGGTGAAGCAGATCTATAAGACCCCTCCT |
| | ATTAAGGATTTCGGCGGATTCAATTTCTCACAGATTCTGCC |
| | AGACCCCAGTAAGCCTTCCAAGAGGAGCTTCATCGAGGAT |
| | CTCCTGTTTAACAAGGTGACCCTGGCAGACGCCGGCTTTAT |
| | TAAGCAATATGGGGATTGCCTGGGCGACATTGCTGCCAGA |
| | GACCTGATTTGCGCCCAGAAATTCAATGGCCTCACAGTGCT |
| | GCCACCTCTGCTGACCGACGAGATGATCGCTCAATACACTA |
| | GCGCACTGCTGGCCGGAACCATCACATCAGGCTGGACCTTC |
| | GGGGCCGGAGCAGCACTGCAGATTCCATTCGCCATGCAGA |
| | TGGCCTATAGATTCAACGGCATTGGCGTCACACAGAACGTG |
| | CTGTACGAAAACCAGAAGCTCATCGCTAACCAGTTTAATTC |
| | CGCAATTGGAAAGATCCAAGATTCACTCAGCTCAACCGCCT |
| | CTGCACTCGGAAAGCTGCAGGACGTGGTCAACCAGAATGC |
| | TCAGGCCCTGAACACACTCGTCAAGCAGCTGTCCTCTAACT |
| | TTGGCGCTATCAGCTCCGTTCTGAACGACATTCTGAGCCGC |
| | CTGGATAAGGTGGAGGCTGAAGTCCAGATTGACCGCCTGA |
| | TTACCGGCCGGCTGCAGTCTCTGCAAACATACGTGACCCAG |
| | CAGCTGATCAGAGCAGCCGAGATCCGGGCATCCGCAAATC |
| | TGGCAGCAACTAAGATGAGCGAATGCGTGCTGGGCCAGTC |
| | CAAGCGGGTGGACTTTTGTGGCAAGGGCTACCACCTGATG |
| | AGCTTCCCCCAGAGCGCCCCACATGGCGTTGTTTTTCTGCA |
| | CGTGACCTATGTCCCTGCTCAGGAAAAGAACTTTACAACTG |
| | CTCCTGCTATCTGCCATGACGGCAAGGCCCACTTCCCACGG |
| | GAGGGAGTGTTTGTGTCCAATGGCACACACTGGTTCGTGAC |
| | CCAGAGGAACTTCTATGAACCCCAGATCATCACCACTGACA |
| | ATACCTTCGTGTCTGGAAATTGCGACGTCGTGATCGGCATC |
| | GTTAACAACACCGTGTACGACCCTCTCCAGCCAGAGCTGGA |
| | CTCCTTTAAGGAGGAACTGGATAAGTATTTTAAGAACCACA |
| | CAAGCCCAGATGTGGATCTCGGGGACATCTCCGGAATTAA |
| | CGCCTCCGTGGTGAATATCCAGAAGGAGATTGACCGCCTA |
| | AATGAAGTTGCCAAGAACCTCAATGAGTCTCTGATTGATCT |
| | GCAGGAACTGGGCAAGTATGAGCAGTGA |
| S2 subunit of a SARS- | (SEQ ID NO: 4) |
| CoV-2 S protein | MSVASQSIIAYTMSLGAENSVAYSNNSIAIPTNFTISVTTEILPV |
| | SMTKTSVDCTMYICGDSTECSNLLLQYGSFCTQLNRALTGIAV |
| | EQDKNTQEVFAQVKQIYKTPPIKDFGGFNFSQILPDPSKPSKRS |
| | FIEDLLFNKVTLADAGFIKQYGDCLGDIAARDLICAQKFNGLT |
| | VLPPLLTDEMIAQYTSALLAGTITSGWTFGAGAALQIPFAMQ |
| | MAYRFNGIGVTQNVLYENQKLIANQFNSAIGKIQDSLSSTASA |
| | LGKLQDVVNQNAQALNTLVKQLSSNFGAISSVLNDILSRLDK |
| | VEAEVQIDRLITGRLQSLQTYVTQQLIRAAEIRASANLAATKM |
| | SECVLGQSKRVDFCGKGYHLMSFPQSAPHGVVFLHVTYVPA |
| | QEKNFTTAPAICHDGKAHFPREGVFVSNGTHWFVTQRNFYEP |
| | QIITTDNTFVSGNCDVVIGIVNNTVYDPLQPELDSFKEELDKYF |
| | KNHTSPDVDLGDISGINASVVNIQKEIDRLNEVAKNLNESLIDL |
| | QELGKYEQ |
| Optimized nucleotide | (SEQ ID NO: 71) |
| sequence encoding the | ATGTCCGTTGCTAGTCAGTCTATTATTGCCTATACCATGAG |
| full length S2 subunit of | CCTCGGAGCTGAGAATAGCGTGGCCTACTCCAATAATTCCA |
| a SARS-CoV-2 S protein | TCGCAATCCCTACTAACTTCACTATTTCTGTGACCACCGAG |
| | ATCCTGCCTGTGTCTATGACTAAGACTAGCGTTGATTGTAC |
| | CATGTATATTTGTGGCGACTCTACCGAATGTTCTAACCTGC |
| | TGCTTCAGTACGGCTCATTTTGCACACAGCTGAACAGAGCC |
| | CTGACTGGGATCGCTGTGGAGCAGGACAAGAACACACAGG |
| | AGGTGTTTGCACAGGTGAAGCAGATCTATAAGACCCCTCCT |
| | ATTAAGGATTTCGGCGGATTCAATTTCTCACAGATTCTGCC |
| | AGACCCCAGTAAGCCTTCCAAGAGGAGCTTCATCGAGGAT |
| | CTCCTGTTTAACAAGGTGACCCTGGCAGACGCCGGCTTTAT |
| | TAAGCAATATGGGGATTGCCTGGGCGACATTGCTGCCAGA |
| | GACCTGATTTGCGCCCAGAAATTCAATGGCCTCACAGTGCT |
| | GCCACCTCTGCTGACCGACGAGATGATCGCTCAATACACTA |
| | GCGCACTGCTGGCCGGAACCATCACATCAGGCTGGACCTTC |
| | GGGGCCGGAGCAGCACTGCAGATTCCATTCGCCATGCAGA |
| | TGGCCTATAGATTCAACGGCATTGGCGTCACACAGAACGTG |
| | CTGTACGAAAACCAGAAGCTCATCGCTAACCAGTTTAATTC |
| | CGCAATTGGAAAGATCCAAGATTCACTCAGCTCAACCGCCT |
| | CTGCACTCGGAAAGCTGCAGGACGTGGTCAACCAGAATGC |
| | TCAGGCCCTGAACACACTCGTCAAGCAGCTGTCCTCTAACT |
| | TTGGCGCTATCAGCTCCGTTCTGAACGACATTCTGAGCCGC |
| | CTGGATAAGGTGGAGGCTGAAGTCCAGATTGACCGCCTGA |
| | TTACCGGCCGGCTGCAGTCTCTGCAAACATACGTGACCCAG |
| | CAGCTGATCAGAGCAGCCGAGATCCGGGCATCCGCAAATC |
| | TGGCAGCAACTAAGATGAGCGAATGCGTGCTGGGCCAGTC |
| | CAAGCGGGTGGACTTTTGTGGCAAGGGCTACCACCTGATG |
| | AGCTTCCCCCAGAGCGCCCCACATGGCGTTGTTTTTCTGCA |
| | CGTGACCTATGTCCCTGCTCAGGAAAAGAACTTTACAACTG |
| | CTCCTGCTATCTGCCATGACGGCAAGGCCCACTTCCCACGG |
| | GAGGGAGTGTTTGTGTCCAATGGCACACACTGGTTCGTGAC |
| | CCAGAGGAACTTCTATGAACCCCAGATCATCACCACTGACA |
| | ATACCTTCGTGTCTGGAAATTGCGACGTCGTGATCGGCATC |
| | GTTAACAACACCGTGTACGACCCTCTCCAGCCAGAGCTGGA |
| | CTCCTTTAAGGAGGAACTGGATAAGTATTTTAAGAACCACA |
| | CAAGCCCAGATGTGGATCTCGGGGACATCTCCGGAATTAA |
| | CGCCTCCGTGGTGAATATCCAGAAGGAGATTGACCGCCTA |
| | AATGAAGTTGCCAAGAACCTCAATGAGTCTCTGATTGATCT |
| | GCAGGAACTGGGCAAGTATGAGCAGTATATCAAATGGCCC |
| | TGGTACATTTGGCTGGGGTTTATCGCCGGACTGATTGCCAT |
| | CGTCATGGTGACCATCATGCTGTGTTGCATGACCTCCTGTT |
| | GTTCCTGTCTGAAGGGCTGCTGTAGTTGCGGCTCTTGCTGT |
| | AAATTCGACGAAGATGATAGCGAGCCCGTGCTGAAGGGCG |
| | TGAAGCTGCATTATACCTGA |
| Full length S2 subunit of | (SEQ ID NO: 72) |
| a SARS-CoV-2 S protein | MSVASQSIIAYTMSLGAENSVAYSNNSIAIPTNFTISVTTEILPV |
| | SMTKTSVDCTMYICGDSTECSNLLLQYGSFCTQLNRALTGIAV |
| | EQDKNTQEVFAQVKQIYKTPPIKDFGGFNFSQILPDPSKPSKRS |
| | FIEDLLFNKVTLADAGFIKQYGDCLGDIAARDLICAQKFNGLT |
| | VLPPLLTDEMIAQYTSALLAGTITSGWTFGAGAALQIPFAMQ |
| | MAYRFNGIGVTQNVLYENQKLIANQFNSAIGKIQDSLSSTASA |
| | LGKLQDVVNQNAQALNTLVKQLSSNFGAISSVLNDILSRLDK |
| | VEAEVQIDRLITGRLQSLQTYVTQQLIRAAEIRASANLAATKM |
| | SECVLGQSKRVDFCGKGYHLMSFPQSAPHGVVFLHVTYVPA |
| | QEKNFTTAPAICHDGKAHFPREGVFVSNGTHWFVTQRNFYEP |
| | QIITTDNTFVSGNCDVVIGIVNNTVYDPLQPELDSFKEELDKYF |
| | KNHTSPDVDLGDISGINASVVNIQKEIDRLNEVAKNLNESLIDL |
| | QELGKYEQYIKWPWYIWLGFIAGLIAIVMVTIMLCCMTSCCSC |
| | LKGCCSCGSCCKFDEDDSEPVLKGVKLHYT |
| Optimized nucleotide | (SEQ ID NO: 73) |
| sequence encoding the | ATGTTCGTCTTCCTCGTGCTGCTCCCACTCGTTTCTTCCCAG |
| S2 subunit of a SARS- | TGTTCCGTTGCTAGTCAGTCTATTATTGCCTATACCATGAGC |
| CoV-2 S protein with a | CTCGGAGCTGAGAATAGCGTGGCCTACTCCAATAATTCCAT |
| signal sequence | CGCAATCCCTACTAACTTCACTATTTCTGTGACCACCGAGA |
| | TCCTGCCTGTGTCTATGACTAAGACTAGCGTTGATTGTACC |
| | ATGTATATTTGTGGCGACTCTACCGAATGTTCTAACCTGCT |
| | GCTTCAGTACGGCTCATTTTGCACACAGCTGAACAGAGCCC |
| | TGACTGGGATCGCTGTGGAGCAGGACAAGAACACACAGGA |
| | GGTGTTTGCACAGGTGAAGCAGATCTATAAGACCCCTCCTA |
| | TTAAGGATTTCGGCGGATTCAATTTCTCACAGATTCTGCCA |
| | GACCCCAGTAAGCCTTCCAAGAGGAGCTTCATCGAGGATCT |
| | CCTGTTTAACAAGGTGACCCTGGCAGACGCCGGCTTTATTA |
| | AGCAATATGGGGATTGCCTGGGCGACATTGCTGCCAGAGA |
| | CCTGATTTGCGCCCAGAAATTCAATGGCCTCACAGTGCTGC |
| | CACCTCTGCTGACCGACGAGATGATCGCTCAATACACTAGC |
| | GCACTGCTGGCCGGAACCATCACATCAGGCTGGACCTTCGG |
| | GGCCGGAGCAGCACTGCAGATTCCATTCGCCATGCAGATG |
| | GCCTATAGATTCAACGGCATTGGCGTCACACAGAACGTGCT |
| | GTACGAAAACCAGAAGCTCATCGCTAACCAGTTTAATTCCG |
| | CAATTGGAAAGATCCAAGATTCACTCAGCTCAACCGCCTCT |
| | GCACTCGGAAAGCTGCAGGACGTGGTCAACCAGAATGCTC |
| | AGGCCCTGAACACACTCGTCAAGCAGCTGTCCTCTAACTTT |
| | GGCGCTATCAGCTCCGTTCTGAACGACATTCTGAGCCGCCT |
| | GGATAAGGTGGAGGCTGAAGTCCAGATTGACCGCCTGATT |
| | ACCGGCCGGCTGCAGTCTCTGCAAACATACGTGACCCAGC |
| | AGCTGATCAGAGCAGCCGAGATCCGGGCATCCGCAAATCT |
| | GGCAGCAACTAAGATGAGCGAATGCGTGCTGGGCCAGTCC |
| | AAGCGGGTGGACTTTTGTGGCAAGGGCTACCACCTGATGA |
| | GCTTCCCCCAGAGCGCCCCACATGGCGTTGTTTTTCTGCAC |
| | GTGACCTATGTCCCTGCTCAGGAAAAGAACTTTACAACTGC |
| | TCCTGCTATCTGCCATGACGGCAAGGCCCACTTCCCACGGG |
| | AGGGAGTGTTTGTGTCCAATGGCACACACTGGTTCGTGACC |
| | CAGAGGAACTTCTATGAACCCCAGATCATCACCACTGACA |
| | ATACCTTCGTGTCTGGAAATTGCGACGTCGTGATCGGCATC |
| | GTTAACAACACCGTGTACGACCCTCTCCAGCCAGAGCTGGA |
| | CTCCTTTAAGGAGGAACTGGATAAGTATTTTAAGAACCACA |
| | CAAGCCCAGATGTGGATCTCGGGGACATCTCCGGAATTAA |
| | CGCCTCCGTGGTGAATATCCAGAAGGAGATTGACCGCCTA |
| | AATGAAGTTGCCAAGAACCTCAATGAGTCTCTGATTGATCT |
| | GCAGGAACTGGGCAAGTATGAGCAGTGA |
| S2 subunit of a SARS- | (SEQ ID NO: 74) |
| CoV-2 S protein with a | MFVFLVLLPLVSSQCSVASQSIIAYTMSLGAENSVAYSNNSIAI |
| signal sequence | PTNFTISVTTEILPVSMTKTSVDCTMYICGDSTECSNLLLQYGS |
| | FCTQLNRALTGIAVEQDKNTQEVFAQVKQIYKTPPIKDFGGFN |
| | FSQILPDPSKPSKRSFIEDLLFNKVTLADAGFIKQYGDCLGDIA |
| | ARDLICAQKFNGLTVLPPLLTDEMIAQYTSALLAGTITSGWTF |
| | GAGAALQIPFAMQMAYRFNGIGVTQNVLYENQKLIANQFNSA |
| | IGKIQDSLSSTASALGKLQDVVNQNAQALNTLVKQLSSNFGAI |
| | SSVLNDILSRLDKVEAEVQIDRLITGRLQSLQTYVTQQLIRAAE |
| | IRASANLAATKMSECVLGQSKRVDFCGKGYHLMSFPQSAPHG |
| | VVFLHVTYVPAQEKNFTTAPAICHDGKAHFPREGVFVSNGTH |
| | WFVTQRNFYEPQIITTDNTFVSGNCDVVIGIVNNTVYDPLQPE |
| | LDSFKEELDKYFKNHTSPDVDLGDISGINASVVNIQKEIDRLNE |
| | VAKNLNESLIDLQELGKYEQ |
| Optimized nucleotide | (SEQ ID NO: 67) |
| sequence encoding the | ATGTTCGTCTTCCTCGTGCTGCTCCCACTCGTTTCTTCCCAG |
| full length S2 subunit of | TGTTCCGTTGCTAGTCAGTCTATTATTGCCTATACCATGAGC |
| a SARS-CoV-2 S protein | CTCGGAGCTGAGAATAGCGTGGCCTACTCCAATAATTCCAT |
| with a signal sequence | CGCAATCCCTACTAACTTCACTATTTCTGTGACCACCGAGA |
| | TCCTGCCTGTGTCTATGACTAAGACTAGCGTTGATTGTACC |
| | ATGTATATTTGTGGCGACTCTACCGAATGTTCTAACCTGCT |
| | GCTTCAGTACGGCTCATTTTGCACACAGCTGAACAGAGCCC |
| | TGACTGGGATCGCTGTGGAGCAGGACAAGAACACACAGGA |
| | GGTGTTTGCACAGGTGAAGCAGATCTATAAGACCCCTCCTA |
| | TTAAGGATTTCGGCGGATTCAATTTCTCACAGATTCTGCCA |
| | GACCCCAGTAAGCCTTCCAAGAGGAGCTTCATCGAGGATCT |
| | CCTGTTTAACAAGGTGACCCTGGCAGACGCCGGCTTTATTA |
| | AGCAATATGGGGATTGCCTGGGCGACATTGCTGCCAGAGA |
| | CCTGATTTGCGCCCAGAAATTCAATGGCCTCACAGTGCTGC |
| | CACCTCTGCTGACCGACGAGATGATCGCTCAATACACTAGC |
| | GCACTGCTGGCCGGAACCATCACATCAGGCTGGACCTTCGG |
| | GGCCGGAGCAGCACTGCAGATTCCATTCGCCATGCAGATG |
| | GCCTATAGATTCAACGGCATTGGCGTCACACAGAACGTGCT |
| | GTACGAAAACCAGAAGCTCATCGCTAACCAGTTTAATTCCG |
| | CAATTGGAAAGATCCAAGATTCACTCAGCTCAACCGCCTCT |
| | GCACTCGGAAAGCTGCAGGACGTGGTCAACCAGAATGCTC |
| | AGGCCCTGAACACACTCGTCAAGCAGCTGTCCTCTAACTTT |
| | GGCGCTATCAGCTCCGTTCTGAACGACATTCTGAGCCGCCT |
| | GGATAAGGTGGAGGCTGAAGTCCAGATTGACCGCCTGATT |
| | ACCGGCCGGCTGCAGTCTCTGCAAACATACGTGACCCAGC |
| | AGCTGATCAGAGCAGCCGAGATCCGGGCATCCGCAAATCT |
| | GGCAGCAACTAAGATGAGCGAATGCGTGCTGGGCCAGTCC |
| | AAGCGGGTGGACTTTTGTGGCAAGGGCTACCACCTGATGA |
| | GCTTCCCCCAGAGCGCCCCACATGGCGTTGTTTTTCTGCAC |
| | GTGACCTATGTCCCTGCTCAGGAAAAGAACTTTACAACTGC |
| | TCCTGCTATCTGCCATGACGGCAAGGCCCACTTCCCACGGG |
| | AGGGAGTGTTTGTGTCCAATGGCACACACTGGTTCGTGACC |
| | CAGAGGAACTTCTATGAACCCCAGATCATCACCACTGACA |
| | ATACCTTCGTGTCTGGAAATTGCGACGTCGTGATCGGCATC |
| | GTTAACAACACCGTGTACGACCCTCTCCAGCCAGAGCTGGA |
| | CTCCTTTAAGGAGGAACTGGATAAGTATTTTAAGAACCACA |
| | CAAGCCCAGATGTGGATCTCGGGGACATCTCCGGAATTAA |
| | CGCCTCCGTGGTGAATATCCAGAAGGAGATTGACCGCCTA |
| | AATGAAGTTGCCAAGAACCTCAATGAGTCTCTGATTGATCT |
| | GCAGGAACTGGGCAAGTATGAGCAGTATATCAAATGGCCC |
| | TGGTACATTTGGCTGGGGTTTATCGCCGGACTGATTGCCAT |
| | CGTCATGGTGACCATCATGCTGTGTTGCATGACCTCCTGTT |
| | GTTCCTGTCTGAAGGGCTGCTGTAGTTGCGGCTCTTGCTGT |
| | AAATTCGACGAAGATGATAGCGAGCCCGTGCTGAAGGGCG |
| | TGAAGCTGCATTATACCTGA |
| Full length S2 subunit of | (SEQ ID NO: 68) |
| a SARS-CoV-2 S protein | MFVFLVLLPLVSSQCSVASQSIIAYTMSLGAENSVAYSNNSIAI |
| with a signal sequence | PTNFTISVTTEILPVSMTKTSVDCTMYICGDSTECSNLLLQYGS |
| | FCTQLNRALTGIAVEQDKNTQEVFAQVKQIYKTPPIKDFGGFN |
| | FSQILPDPSKPSKRSFIEDLLFNKVTLADAGFIKQYGDCLGDIA |
| | ARDLICAQKFNGLTVLPPLLTDEMIAQYTSALLAGTITSGWTF |
| | GAGAALQIPFAMQMAYRFNGIGVTQNVLYENQKLIANQFNSA |
| | IGKIQDSLSSTASALGKLQDVVNQNAQALNTLVKQLSSNFGAI |
| | SSVLNDILSRLDKVEAEVQIDRLITGRLQSLQTYVTQQLIRAAE |
| | IRASANLAATKMSECVLGQSKRVDFCGKGYHLMSFPQSAPHG |
| | VVFLHVTYVPAQEKNFTTAPAICHDGKAHFPREGVFVSNGTH |
| | WFVTQRNFYEPQIITTDNTFVSGNCDVVIGIVNNTVYDPLQPE |
| | LDSFKEELDKYFKNHTSPDVDLGDISGINASVVNIQKEIDRLNE |
| | VAKNLNESLIDLQELGKYEQYIKWPWYIWLGFIAGLIAIVMVT |
| | IMLCCMTSCCSCLKGCCSCGSCCKFDEDDSEPVLKGVKLHYT |
| Optimized nucleotide | (SEQ ID NO: 33) |
| sequence encoding the | ATGAGCTTCATCGAGGATCTCCTGTTTAACAAGGTGACCCT |
| S2′ subunit of a SARS- | GGCAGACGCCGGCTTTATTAAGCAATATGGGGATTGCCTGG |
| CoV-2 S protein | GCGACATTGCTGCCAGAGACCTGATTTGCGCCCAGAAATTC |
| | AATGGCCTCACAGTGCTGCCACCTCTGCTGACCGACGAGAT |
| | GATCGCTCAATACACTAGCGCACTGCTGGCCGGAACCATCA |
| | CATCAGGCTGGACCTTCGGGGCCGGAGCAGCACTGCAGAT |
| | TCCATTCGCCATGCAGATGGCCTATAGATTCAACGGCATTG |
| | GCGTCACACAGAACGTGCTGTACGAAAACCAGAAGCTCAT |
| | CGCTAACCAGTTTAATTCCGCAATTGGAAAGATCCAAGATT |
| | CACTCAGCTCAACCGCCTCTGCACTCGGAAAGCTGCAGGAC |
| | GTGGTCAACCAGAATGCTCAGGCCCTGAACACACTCGTCA |
| | AGCAGCTGTCCTCTAACTTTGGCGCTATCAGCTCCGTTCTG |
| | AACGACATTCTGAGCCGCCTGGATAAGGTGGAGGCTGAAG |
| | TCCAGATTGACCGCCTGATTACCGGCCGGCTGCAGTCTCTG |
| | CAAACATACGTGACCCAGCAGCTGATCAGAGCAGCCGAGA |
| | TCCGGGCATCCGCAAATCTGGCAGCAACTAAGATGAGCGA |
| | ATGCGTGCTGGGCCAGTCCAAGCGGGTGGACTTTTGTGGCA |
| | AGGGCTACCACCTGATGAGCTTCCCCCAGAGCGCCCCACAT |
| | GGCGTTGTTTTTCTGCACGTGACCTATGTCCCTGCTCAGGA |
| | AAAGAACTTTACAACTGCTCCTGCTATCTGCCATGACGGCA |
| | AGGCCCACTTCCCACGGGAGGGAGTGTTTGTGTCCAATGGC |
| | ACACACTGGTTCGTGACCCAGAGGAACTTCTATGAACCCCA |
| | GATCATCACCACTGACAATACCTTCGTGTCTGGAAATTGCG |
| | ACGTCGTGATCGGCATCGTTAACAACACCGTGTACGACCCT |
| | CTCCAGCCAGAGCTGGACTCCTTTAAGGAGGAACTGGATA |
| | AGTATTTTAAGAACCACACAAGCCCAGATGTGGATCTCGG |
| | GGACATCTCCGGAATTAACGCCTCCGTGGTGAATATCCAGA |
| | AGGAGATTGACCGCCTAAATGAAGTTGCCAAGAACCTCAA |
| | TGAGTCTCTGATTGATCTGCAGGAACTGGGCAAGTATGAGC |
| | AGTAA |
| S2′ subunit of a SARS- | (SEQ ID NO: 5) |
| CoV-2 S protein | MSFIEDLLFNKVTLADAGFIKQYGDCLGDIAARDLICAQKFNG |
| | LTVLPPLLTDEMIAQYTSALLAGTITSGWTFGAGAALQIPFAM |
| | QMAYRFNGIGVTQNVLYENQKLIANQFNSAIGKIQDSLSSTAS |
| | ALGKLQDVVNQNAQALNTLVKQLSSNFGAISSVLNDILSRLD |
| | KVEAEVQIDRLITGRLQSLQTYVTQQLIRAAEIRASANLAATK |
| | MSECVLGQSKRVDFCGKGYHLMSFPQSAPHGVVFLHVTYVP |
| | AQEKNFTTAPAICHDGKAHFPREGVFVSNGTHWFVTQRNFYE |
| | PQIITTDNTFVSGNCDVVIGIVNNTVYDPLQPELDSFKEELDKY |
| | FKNHTSPDVDLGDISGINASVVNIQKEIDRLNEVAKNLNESLID |
| | LQELGKYEQ |
| Optimized nucleotide | (SEQ ID NO: 97) |
| sequence encoding the | ATGAGCTTCATCGAGGATCTCCTGTTTAACAAGGTGACCCT |
| full length S2′ subunit of | GGCAGACGCCGGCTTTATTAAGCAATATGGGGATTGCCTGG |
| a SARS-CoV-2 S protein | GCGACATTGCTGCCAGAGACCTGATTTGCGCCCAGAAATTC |
| | AATGGCCTCACAGTGCTGCCACCTCTGCTGACCGACGAGAT |
| | GATCGCTCAATACACTAGCGCACTGCTGGCCGGAACCATCA |
| | CATCAGGCTGGACCTTCGGGGCCGGAGCAGCACTGCAGAT |
| | TCCATTCGCCATGCAGATGGCCTATAGATTCAACGGCATTG |
| | GCGTCACACAGAACGTGCTGTACGAAAACCAGAAGCTCAT |
| | CGCTAACCAGTTTAATTCCGCAATTGGAAAGATCCAAGATT |
| | CACTCAGCTCAACCGCCTCTGCACTCGGAAAGCTGCAGGAC |
| | GTGGTCAACCAGAATGCTCAGGCCCTGAACACACTCGTCA |
| | AGCAGCTGTCCTCTAACTTTGGCGCTATCAGCTCCGTTCTG |
| | AACGACATTCTGAGCCGCCTGGATAAGGTGGAGGCTGAAG |
| | TCCAGATTGACCGCCTGATTACCGGCCGGCTGCAGTCTCTG |
| | CAAACATACGTGACCCAGCAGCTGATCAGAGCAGCCGAGA |
| | TCCGGGCATCCGCAAATCTGGCAGCAACTAAGATGAGCGA |
| | ATGCGTGCTGGGCCAGTCCAAGCGGGTGGACTTTTGTGGCA |
| | AGGGCTACCACCTGATGAGCTTCCCCCAGAGCGCCCCACAT |
| | GGCGTTGTTTTTCTGCACGTGACCTATGTCCCTGCTCAGGA |
| | AAAGAACTTTACAACTGCTCCTGCTATCTGCCATGACGGCA |
| | AGGCCCACTTCCCACGGGAGGGAGTGTTTGTGTCCAATGGC |
| | ACACACTGGTTCGTGACCCAGAGGAACTTCTATGAACCCCA |
| | GATCATCACCACTGACAATACCTTCGTGTCTGGAAATTGCG |
| | ACGTCGTGATCGGCATCGTTAACAACACCGTGTACGACCCT |
| | CTCCAGCCAGAGCTGGACTCCTTTAAGGAGGAACTGGATA |
| | AGTATTTTAAGAACCACACAAGCCCAGATGTGGATCTCGG |
| | GGACATCTCCGGAATTAACGCCTCCGTGGTGAATATCCAGA |
| | AGGAGATTGACCGCCTAAATGAAGTTGCCAAGAACCTCAA |
| | TGAGTCTCTGATTGATCTGCAGGAACTGGGCAAGTATGAGC |
| | AGTATATCAAATGGCCCTGGTACATTTGGCTGGGGTTTATC |
| | GCCGGACTGATTGCCATCGTCATGGTGACCATCATGCTGTG |
| | TTGCATGACCTCCTGTTGTTCCTGTCTGAAGGGCTGCTGTA |
| | GTTGCGGCTCTTGCTGTAAATTCGACGAAGATGATAGCGAG |
| | CCCGTGCTGAAGGGCGTGAAGCTGCATTATACCTGA |
| Full length S2′ subunit | (SEQ ID NO: 98) |
| of a SARS-CoV-2 S | MSFIEDLLFNKVTLADAGFIKQYGDCLGDIAARDLICAQKFNG |
| protein | LTVLPPLLTDEMIAQYTSALLAGTITSGWTFGAGAALQIPFAM |
| | QMAYRFNGIGVTQNVLYENQKLIANQFNSAIGKIQDSLSSTAS |
| | ALGKLQDVVNQNAQALNTLVKQLSSNFGAISSVLNDILSRLD |
| | KVEAEVQIDRLITGRLQSLQTYVTQQLIRAAEIRASANLAATK |
| | MSECVLGQSKRVDFCGKGYHLMSFPQSAPHGVVFLHVTYVP |
| | AQEKNFTTAPAICHDGKAHFPREGVFVSNGTHWFVTQRNFYE |
| | PQIITTDNTFVSGNCDVVIGIVNNTVYDPLQPELDSFKEELDKY |
| | FKNHTSPDVDLGDISGINASVVNIQKEIDRLNEVAKNLNESLID |
| | LQELGKYEQYIKWPWYIWLGFIAGLIAIVMVTIMLCCMTSCCS |
| | CLKGCCSCGSCCKFDEDDSEPVLKGVKLHYT |
| Optimized nucleotide | (SEQ ID NO: 65) |
| sequence encoding the | ATGTTCGTCTTCCTCGTGCTGCTCCCACTCGTTTCTTCCCAG |
| S2′ subunit of a SARS- | TGTAGCTTCATCGAGGATCTCCTGTTTAACAAGGTGACCCT |
| CoV-2 S protein with a | GGCAGACGCCGGCTTTATTAAGCAATATGGGGATTGCCTGG |
| signal sequence | GCGACATTGCTGCCAGAGACCTGATTTGCGCCCAGAAATTC |
| | AATGGCCTCACAGTGCTGCCACCTCTGCTGACCGACGAGAT |
| | GATCGCTCAATACACTAGCGCACTGCTGGCCGGAACCATCA |
| | CATCAGGCTGGACCTTCGGGGCCGGAGCAGCACTGCAGAT |
| | TCCATTCGCCATGCAGATGGCCTATAGATTCAACGGCATTG |
| | GCGTCACACAGAACGTGCTGTACGAAAACCAGAAGCTCAT |
| | CGCTAACCAGTTTAATTCCGCAATTGGAAAGATCCAAGATT |
| | CACTCAGCTCAACCGCCTCTGCACTCGGAAAGCTGCAGGAC |
| | GTGGTCAACCAGAATGCTCAGGCCCTGAACACACTCGTCA |
| | AGCAGCTGTCCTCTAACTTTGGCGCTATCAGCTCCGTTCTG |
| | AACGACATTCTGAGCCGCCTGGATAAGGTGGAGGCTGAAG |
| | TCCAGATTGACCGCCTGATTACCGGCCGGCTGCAGTCTCTG |
| | CAAACATACGTGACCCAGCAGCTGATCAGAGCAGCCGAGA |
| | TCCGGGCATCCGCAAATCTGGCAGCAACTAAGATGAGCGA |
| | ATGCGTGCTGGGCCAGTCCAAGCGGGTGGACTTTTGTGGCA |
| | AGGGCTACCACCTGATGAGCTTCCCCCAGAGCGCCCCACAT |
| | GGCGTTGTTTTTCTGCACGTGACCTATGTCCCTGCTCAGGA |
| | AAAGAACTTTACAACTGCTCCTGCTATCTGCCATGACGGCA |
| | AGGCCCACTTCCCACGGGAGGGAGTGTTTGTGTCCAATGGC |
| | ACACACTGGTTCGTGACCCAGAGGAACTTCTATGAACCCCA |
| | GATCATCACCACTGACAATACCTTCGTGTCTGGAAATTGCG |
| | ACGTCGTGATCGGCATCGTTAACAACACCGTGTACGACCCT |
| | CTCCAGCCAGAGCTGGACTCCTTTAAGGAGGAACTGGATA |
| | AGTATTTTAAGAACCACACAAGCCCAGATGTGGATCTCGG |
| | GGACATCTCCGGAATTAACGCCTCCGTGGTGAATATCCAGA |
| | AGGAGATTGACCGCCTAAATGAAGTTGCCAAGAACCTCAA |
| | TGAGTCTCTGATTGATCTGCAGGAACTGGGCAAGTATGAGC |
| | AGTAA |
| S2′ subunit of a SARS- | (SEQ ID NO: 66) |
| CoV-2 S protein with a | MFVFLVLLPLVSSQCSFIEDLLFNKVTLADAGFIKQYGDCLGDI |
| signal sequence | AARDLICAQKFNGLTVLPPLLTDEMIAQYTSALLAGTITSGWT |
| | FGAGAALQIPFAMQMAYRFNGIGVTQNVLYENQKLIANQFNS |
| | AIGKIQDSLSSTASALGKLQDVVNQNAQALNTLVKQLSSNFG |
| | AISSVLNDILSRLDKVEAEVQIDRLITGRLQSLQTYVTQQLIRA |
| | AEIRASANLAATKMSECVLGQSKRVDFCGKGYHLMSFPQSAP |
| | HGVVFLHVTYVPAQEKNFTTAPAICHDGKAHFPREGVFVSNG |
| | THWFVTQRNFYEPQIITTDNTFVSGNCDVVIGIVNNTVYDPLQ |
| | PELDSFKEELDKYFKNHTSPDVDLGDISGINASVVNIQKEIDRL |
| | NEVAKNLNESLIDLQELGKYEQQCSFIEDLLFNKVTLADAGFI |
| | KQYGDCLGDIAARDLICAQKFNGLTVLPPLLTDEMIAQYTSAL |
| | LAGTITSGWTFGAGAALQIPFAMQMAYRFNGIGVTQNVLYEN |
| | QKLIANQFNSAIGKIQDSLSSTASALGKLQDVVNQNAQALNTL |
| | VKQLSSNFGAISSVLNDILSRLDKVEAEVQIDRLITGRLQSLQT |
| | YVTQQLIRAAEIRASANLAATKMSECVLGQSKRVDFCGKGYH |
| | LMSFPQSAPHGVVFLHVTYVPAQEKNFTTAPAICHDGKAHFP |
| | REGVFVSNGTHWFVTQRNFYEPQIITTDNTFVSGNCDVVIGIV |
| | NNTVYDPLQPELDSFKEELDKYFKNHTSPDVDLGDISGINASV |
| | VNIQKEIDRLNEVAKNLNESLIDLQELGKYEQ |
| Optimized nucleotide | (SEQ ID NO: 95) |
| sequence encoding the | ATGTTCGTCTTCCTCGTGCTGCTCCCACTCGTTTCTTCCCAG |
| full length S2′ subunit of | TGTAGCTTCATCGAGGATCTCCTGTTTAACAAGGTGACCCT |
| a SARS-CoV-2 S protein | GGCAGACGCCGGCTTTATTAAGCAATATGGGGATTGCCTGG |
| with a signal sequence | GCGACATTGCTGCCAGAGACCTGATTTGCGCCCAGAAATTC |
| | AATGGCCTCACAGTGCTGCCACCTCTGCTGACCGACGAGAT |
| | GATCGCTCAATACACTAGCGCACTGCTGGCCGGAACCATCA |
| | CATCAGGCTGGACCTTCGGGGCCGGAGCAGCACTGCAGAT |
| | TCCATTCGCCATGCAGATGGCCTATAGATTCAACGGCATTG |
| | GCGTCACACAGAACGTGCTGTACGAAAACCAGAAGCTCAT |
| | CGCTAACCAGTTTAATTCCGCAATTGGAAAGATCCAAGATT |
| | CACTCAGCTCAACCGCCTCTGCACTCGGAAAGCTGCAGGAC |
| | GTGGTCAACCAGAATGCTCAGGCCCTGAACACACTCGTCA |
| | AGCAGCTGTCCTCTAACTTTGGCGCTATCAGCTCCGTTCTG |
| | AACGACATTCTGAGCCGCCTGGATAAGGTGGAGGCTGAAG |
| | TCCAGATTGACCGCCTGATTACCGGCCGGCTGCAGTCTCTG |
| | CAAACATACGTGACCCAGCAGCTGATCAGAGCAGCCGAGA |
| | TCCGGGCATCCGCAAATCTGGCAGCAACTAAGATGAGCGA |
| | ATGCGTGCTGGGCCAGTCCAAGCGGGTGGACTTTTGTGGCA |
| | AGGGCTACCACCTGATGAGCTTCCCCCAGAGCGCCCCACAT |
| | GGCGTTGTTTTTCTGCACGTGACCTATGTCCCTGCTCAGGA |
| | AAAGAACTTTACAACTGCTCCTGCTATCTGCCATGACGGCA |
| | AGGCCCACTTCCCACGGGAGGGAGTGTTTGTGTCCAATGGC |
| | ACACACTGGTTCGTGACCCAGAGGAACTTCTATGAACCCCA |
| | GATCATCACCACTGACAATACCTTCGTGTCTGGAAATTGCG |
| | ACGTCGTGATCGGCATCGTTAACAACACCGTGTACGACCCT |
| | CTCCAGCCAGAGCTGGACTCCTTTAAGGAGGAACTGGATA |
| | AGTATTTTAAGAACCACACAAGCCCAGATGTGGATCTCGG |
| | GGACATCTCCGGAATTAACGCCTCCGTGGTGAATATCCAGA |
| | AGGAGATTGACCGCCTAAATGAAGTTGCCAAGAACCTCAA |
| | TGAGTCTCTGATTGATCTGCAGGAACTGGGCAAGTATGAGC |
| | AGTATATCAAATGGCCCTGGTACATTTGGCTGGGGTTTATC |
| | GCCGGACTGATTGCCATCGTCATGGTGACCATCATGCTGTG |
| | TTGCATGACCTCCTGTTGTTCCTGTCTGAAGGGCTGCTGTA |
| | GTTGCGGCTCTTGCTGTAAATTCGACGAAGATGATAGCGAG |
| | CCCGTGCTGAAGGGCGTGAAGCTGCATTATACCTGA |
| Full length S2′ subunit | (SEQ ID NO: 96) |
| of a SARS-CoV-2 S | MFVFLVLLPLVSSQCSFIEDLLFNKVTLADAGFIKQYGDCLGDI |
| protein with a signal | AARDLICAQKFNGLTVLPPLLTDEMIAQYTSALLAGTITSGWT |
| sequence | FGAGAALQIPFAMQMAYRFNGIGVTQNVLYENQKLIANQFNS |
| | AIGKIQDSLSSTASALGKLQDVVNQNAQALNTLVKQLSSNFG |
| | AISSVLNDILSRLDKVEAEVQIDRLITGRLQSLQTYVTQQLIRA |
| | AEIRASANLAATKMSECVLGQSKRVDFCGKGYHLMSFPQSAP |
| | HGVVFLHVTYVPAQEKNFTTAPAICHDGKAHFPREGVFVSNG |
| | THWFVTQRNFYEPQIITTDNTFVSGNCDVVIGIVNNTVYDPLQ |
| | PELDSFKEELDKYFKNHTSPDVDLGDISGINASVVNIQKEIDRL |
| | NEVAKNLNESLIDLQELGKYEQYIKWPWYIWLGFIAGLIAIVM |
| | VTIMLCCMTSCCSCLKGCCSCGSCCKFDEDDSEPVLKGVKLH |
| | YT |
| Optimized nucleotide | (SEQ ID NO: 34) |
| sequence encoding the | ATGCCTAATATCACTAACCTGTGTCCTTTCGGTGAAGTGTT |
| receptor-binding | CAACGCCACCAGGTTTGCTAGCGTGTATGCCTGGAACAGG |
| domain of a SARS-CoV- | AAGAGGATCTCTAACTGCGTCGCCGACTATTCCGTGCTGTA |
| 2 S protein | TAACAGCGCCTCCTTCTCCACATTCAAATGCTATGGAGTGA |
| | GCCCGACAAAACTGAACGATCTCTGCTTTACAAATGTCTAC |
| | GCCGACTCTTTTGTGATCAGAGGGGACGAGGTCCGGCAGA |
| | TCGCACCAGGACAGACAGGCAAGATTGCTGACTACAACTA |
| | TAAGCTGCCTGACGACTTCACAGGATGTGTGATCGCATGGA |
| | ACTCAAACAATCTGGACTCCAAAGTCGGGGGCAACTATAA |
| | TTACCTGTATCGCCTGTTCCGGAAGTCCAACCTGAAGCCCT |
| | TCGAGAGGGACATCAGTACAGAGATCTATCAGGCTGGCTC |
| | CACCCCTTGCAATGGCGTCGAAGGCTTTAATTGTTATTTTCC |
| | CCTGCAGTCTTACGGGTTTCAGCCTACTAATGGAGTTGGGT |
| | ACCAGCCATACAGAGTGGTCGTGCTCAGCTTCGAGCTCCTG |
| | CATGCTCCATAA |
| Receptor-binding | (SEQ ID NO: 6) |
| domain of a SARS-CoV- | MPNITNLCPFGEVFNATRFASVYAWNRKRISNCVADYSVLYN |
| 2 S protein | SASFSTFKCYGVSPTKLNDLCFTNVYADSFVIRGDEVRQIAPG |
| | QTGKIADYNYKLPDDFTGCVIAWNSNNLDSKVGGNYNYLYR |
| | LFRKSNLKPFERDISTEIYQAGSTPCNGVEGFNCYFPLQSYGFQ |
| | PTNGVGYQPYRVVVLSFELLHAP |
| Optimized nucleotide | (SEQ ID NO: 35) |
| sequence encoding the | ATGTTCGTCTTCCTCGTGCTGCTCCCACTCGTTTCTTCCCAG |
| receptor-binding | TGTCCTAATATCACTAACCTGTGTCCTTTCGGTGAAGTGTTC |
| domain of a SARS-CoV- | AACGCCACCAGGTTTGCTAGCGTGTATGCCTGGAACAGGA |
| 2 S protein with a signal | AGAGGATCTCTAACTGCGTCGCCGACTATTCCGTGCTGTAT |
| sequence | AACAGCGCCTCCTTCTCCACATTCAAATGCTATGGAGTGAG |
| | CCCGACAAAACTGAACGATCTCTGCTTTACAAATGTCTACG |
| | CCGACTCTTTTGTGATCAGAGGGGACGAGGTCCGGCAGATC |
| | GCACCAGGACAGACAGGCAAGATTGCTGACTACAACTATA |
| | AGCTGCCTGACGACTTCACAGGATGTGTGATCGCATGGAAC |
| | TCAAACAATCTGGACTCCAAAGTCGGGGGCAACTATAATT |
| | ACCTGTATCGCCTGTTCCGGAAGTCCAACCTGAAGCCCTTC |
| | GAGAGGGACATCAGTACAGAGATCTATCAGGCTGGCTCCA |
| | CCCCTTGCAATGGCGTCGAAGGCTTTAATTGTTATTTTCCCC |
| | TGCAGTCTTACGGGTTTCAGCCTACTAATGGAGTTGGGTAC |
| | CAGCCATACAGAGTGGTCGTGCTCAGCTTCGAGCTCCTGCA |
| | TGCTCCATAA |
| Receptor-binding | (SEQ ID NO: 8) |
| domain of a SARS-CoV- | MFVFLVLLPLVSSQCPNITNLCPFGEVFNATRFASVYAWNRKR |
| 2 S protein with a signal | ISNCVADYSVLYNSASFSTFKCYGVSPTKLNDLCFTNVYADSF |
| sequence | VIRGDEVRQIAPGQTGKIADYNYKLPDDFTGCVIAWNSNNLD |
| | SKVGGNYNYLYRLFRKSNLKPFERDISTEIYQAGSTPCNGVEG |
| | FNCYFPLQSYGFQPTNGVGYQPYRVVVLSFELLHAP |
| Optimized nucleotide | (SEQ ID NO: 42) |
| sequence encoding a | ATGTTCGTCTTCCTCGTGCTGCTCCCACTCGTTTCTTCCCAG |
| SARS-CoV-2 S protein | TGTGTCAACCTGACAACTAGGACTCAGCTGCCACCAGCCTA |
| mutated to remove a | CACCAACTCCTTCACCAGAGGCGTGTATTACCCAGACAAGG |
| furin cleavage site | TGTTTAGAAGCAGCGTGCTGCACTCTACCCAGGACCTCTTT |
| | CTGCCCTTTTTCAGCAACGTGACATGGTTTCACGCAATTCA |
| | CGTGTCCGGCACTAATGGCACAAAGCGGTTCGACAATCCA |
| | GTCCTGCCTTTCAACGATGGCGTCTACTTTGCATCTACTGA |
| | GAAATCCAATATCATTAGGGGATGGATCTTCGGCACAACCC |
| | TGGATTCTAAGACCCAGAGCCTGCTGATCGTCAACAACGCC |
| | ACAAACGTGGTCATTAAGGTTTGCGAGTTTCAGTTCTGTAA |
| | CGATCCTTTTCTGGGCGTGTATTATCATAAGAACAATAAGA |
| | GCTGGATGGAGTCCGAGTTTAGAGTGTATAGCTCTGCAAAT |
| | AATTGTACCTTTGAGTACGTGAGCCAGCCCTTTCTGATGGA |
| | CCTGGAGGGAAAACAAGGAAACTTCAAAAACCTGCGGGAA |
| | TTCGTTTTCAAAAACATCGACGGCTATTTCAAGATCTATAG |
| | CAAGCATACCCCAATCAACCTCGTGAGGGACCTCCCCCAG |
| | GGCTTTAGCGCACTGGAGCCACTGGTTGACCTGCCTATCGG |
| | CATTAATATCACAAGATTTCAGACCCTGCTGGCACTGCATA |
| | GAAGCTATCTGACCCCTGGAGACTCCTCTAGTGGGTGGACT |
| | GCCGGCGCCGCTGCCTACTATGTGGGCTATCTGCAGCCACG |
| | GACATTCCTGCTGAAATACAATGAGAACGGGACAATCACA |
| | GATGCTGTTGATTGCGCACTCGACCCCCTGTCCGAGACAAA |
| | GTGCACTCTCAAGAGCTTTACCGTCGAGAAGGGCATCTATC |
| | AGACCTCAAACTTCAGGGTGCAGCCCACAGAATCTATCGTG |
| | CGCTTCCCTAATATCACTAACCTGTGTCCTTTCGGTGAAGT |
| | GTTCAACGCCACCAGGTTTGCTAGCGTGTATGCCTGGAACA |
| | GGAAGAGGATCTCTAACTGCGTCGCCGACTATTCCGTGCTG |
| | TATAACAGCGCCTCCTTCTCCACATTCAAATGCTATGGAGT |
| | GAGCCCGACAAAACTGAACGATCTCTGCTTTACAAATGTCT |
| | ACGCCGACTCTTTTGTGATCAGAGGGGACGAGGTCCGGCA |
| | GATCGCACCAGGACAGACAGGCAAGATTGCTGACTACAAC |
| | TATAAGCTGCCTGACGACTTCACAGGATGTGTGATCGCATG |
| | GAACTCAAACAATCTGGACTCCAAAGTCGGGGGCAACTAT |
| | AATTACCTGTATCGCCTGTTCCGGAAGTCCAACCTGAAGCC |
| | CTTCGAGAGGGACATCAGTACAGAGATCTATCAGGCTGGC |
| | TCCACCCCTTGCAATGGCGTCGAAGGCTTTAATTGTTATTTT |
| | CCCCTGCAGTCTTACGGGTTTCAGCCTACTAATGGAGTTGG |
| | GTACCAGCCATACAGAGTGGTCGTGCTCAGCTTCGAGCTCC |
| | TGCATGCTCCAGCTACAGTTTGCGGGCCAAAGAAGTCCACT |
| | AACCTGGTGAAGAATAAGTGCGTCAACTTCAACTTTAACGG |
| | GCTCACCGGCACCGGCGTGCTGACTGAGAGCAACAAGAAG |
| | TTTCTGCCATTTCAACAGTTTGGACGGGACATTGCCGACAC |
| | CACCGATGCCGTTCGGGATCCACAGACCCTGGAAATTCTGG |
| | ACATTACACCGTGCAGCTTCGGGGGCGTGAGCGTGATCAC |
| | ACCCGGAACCAATACAAGCAACCAGGTTGCCGTCCTGTATC |
| | AGGATGTCAATTGCACAGAAGTGCCAGTTGCTATCCACGCA |
| | GACCAGCTGACTCCCACATGGCGGGTGTATAGCACCGGAT |
| | CCAACGTGTTTCAGACCCGCGCCGGATGTCTCATTGGGGCC |
| | GAGCACGTGAATAACAGCTACGAGTGCGACATCCCCATTG |
| | GCGCCGGCATTTGTGCGTCTTACCAGACTCAGACCAACTCT |
| | CCTGGCTCCGCCTCTTCCGTTGCTAGTCAGTCTATTATTGCC |
| | TATACCATGAGCCTCGGAGCTGAGAATAGCGTGGCCTACTC |
| | CAATAATTCCATCGCAATCCCTACTAACTTCACTATTTCTGT |
| | GACCACCGAGATCCTGCCTGTGTCTATGACTAAGACTAGCG |
| | TTGATTGTACCATGTATATTTGTGGCGACTCTACCGAATGTT |
| | CTAACCTGCTGCTTCAGTACGGCTCATTTTGCACACAGCTG |
| | AACAGAGCCCTGACTGGGATCGCTGTGGAGCAGGACAAGA |
| | ACACACAGGAGGTGTTTGCACAGGTGAAGCAGATCTATAA |
| | GACCCCTCCTATTAAGGATTTCGGCGGATTCAATTTCTCAC |
| | AGATTCTGCCAGACCCCAGTAAGCCTTCCAAGAGGAGCTTC |
| | ATCGAGGATCTCCTGTTTAACAAGGTGACCCTGGCAGACGC |
| | CGGCTTTATTAAGCAATATGGGGATTGCCTGGGCGACATTG |
| | CTGCCAGAGACCTGATTTGCGCCCAGAAATTCAATGGCCTC |
| | ACAGTGCTGCCACCTCTGCTGACCGACGAGATGATCGCTCA |
| | ATACACTAGCGCACTGCTGGCCGGAACCATCACATCAGGCT |
| | GGACCTTCGGGGCCGGAGCAGCACTGCAGATTCCATTCGCC |
| | ATGCAGATGGCCTATAGATTCAACGGCATTGGCGTCACACA |
| | GAACGTGCTGTACGAAAACCAGAAGCTCATCGCTAACCAG |
| | TTTAATTCCGCAATTGGAAAGATCCAAGATTCACTCAGCTC |
| | AACCGCCTCTGCACTCGGAAAGCTGCAGGACGTGGTCAAC |
| | CAGAATGCTCAGGCCCTGAACACACTCGTCAAGCAGCTGTC |
| | CTCTAACTTTGGCGCTATCAGCTCCGTTCTGAACGACATTCT |
| | GAGCCGCCTGGATAAGGTGGAGGCTGAAGTCCAGATTGAC |
| | CGCCTGATTACCGGCCGGCTGCAGTCTCTGCAAACATACGT |
| | GACCCAGCAGCTGATCAGAGCAGCCGAGATCCGGGCATCC |
| | GCAAATCTGGCAGCAACTAAGATGAGCGAATGCGTGCTGG |
| | GCCAGTCCAAGCGGGTGGACTTTTGTGGCAAGGGCTACCA |
| | CCTGATGAGCTTCCCCCAGAGCGCCCCACATGGCGTTGTTT |
| | TTCTGCACGTGACCTATGTCCCTGCTCAGGAAAAGAACTTT |
| | ACAACTGCTCCTGCTATCTGCCATGACGGCAAGGCCCACTT |
| | CCCACGGGAGGGAGTGTTTGTGTCCAATGGCACACACTGGT |
| | TCGTGACCCAGAGGAACTTCTATGAACCCCAGATCATCACC |
| | ACTGACAATACCTTCGTGTCTGGAAATTGCGACGTCGTGAT |
| | CGGCATCGTTAACAACACCGTGTACGACCCTCTCCAGCCAG |
| | AGCTGGACTCCTTTAAGGAGGAACTGGATAAGTATTTTAAG |
| | AACCACACAAGCCCAGATGTGGATCTCGGGGACATCTCCG |
| | GAATTAACGCCTCCGTGGTGAATATCCAGAAGGAGATTGA |
| | CCGCCTAAATGAAGTTGCCAAGAACCTCAATGAGTCTCTGA |
| | TTGATCTGCAGGAACTGGGCAAGTATGAGCAGTATATCAA |
| | ATGGCCCTGGTACATTTGGCTGGGGTTTATCGCCGGACTGA |
| | TTGCCATCGTCATGGTGACCATCATGCTGTGTTGCATGACC |
| | TCCTGTTGTTCCTGTCTGAAGGGCTGCTGTAGTTGCGGCTCT |
| | TGCTGTAAATTCGACGAAGATGATAGCGAGCCCGTGCTGA |
| | AGGGCGTGAAGCTGCATTATACCTGA |
| SARS-CoV-2 S protein | (SEQ ID NO: 9) |
| mutated to remove a | MFVFLVLLPLVSSQCVNLTTRTQLPPAYTNSFTRGVYYPDKVF |
| furin cleavage site | RSSVLHSTQDLFLPFFSNVTWFHAIHVSGTNGTKRFDNPVLPF |
| | NDGVYFASTEKSNIIRGWIFGTTLDSKTQSLLIVNNATNVVIKV |
| | CEFQFCNDPFLGVYYHKNNKSWMESEFRVYSSANNCTFEYVS |
| | QPFLMDLEGKQGNFKNLREFVFKNIDGYFKIYSKHTPINLVRD |
| | LPQGFSALEPLVDLPIGINITRFQTLLALHRSYLTPGDSSSGWT |
| | AGAAAYYVGYLQPRTFLLKYNENGTITDAVDCALDPLSETKC |
| | TLKSFTVEKGIYQTSNFRVQPTESIVRFPNITNLCPFGEVFNATR |
| | FASVYAWNRKRISNCVADYSVLYNSASFSTFKCYGVSPTKLN |
| | DLCFTNVYADSFVIRGDEVRQIAPGQTGKIADYNYKLPDDFTG |
| | CVIAWNSNNLDSKVGGNYNYLYRLFRKSNLKPFERDISTEIYQ |
| | AGSTPCNGVEGFNCYFPLQSYGFQPTNGVGYQPYRVVVLSFE |
| | LLHAPATVCGPKKSTNLVKNKCVNFNFNGLTGTGVLTESNKK |
| | FLPFQQFGRDIADTTDAVRDPQTLEILDITPCSFGGVSVITPGTN |
| | TSNQVAVLYQDVNCTEVPVAIHADQLTPTWRVYSTGSNVFQT |
| | RAGCLIGAEHVNNSYECDIPIGAGICASYQTQTNSPGSASSVAS |
| | QSIIAYTMSLGAENSVAYSNNSIAIPTNFTISVTTEILPVSMTKT |
| | SVDCTMYICGDSTECSNLLLQYGSFCTQLNRALTGIAVEQDK |
| | NTQEVFAQVKQIYKTPPIKDFGGFNFSQILPDPSKPSKRSFIEDL |
| | LFNKVTLADAGFIKQYGDCLGDIAARDLICAQKFNGLTVLPPL |
| | LTDEMIAQYTSALLAGTITSGWTFGAGAALQIPFAMQMAYRF |
| | NGIGVTQNVLYENQKLIANQFNSAIGKIQDSLSSTASALGKLQ |
| | DVVNQNAQALNTLVKQLSSNFGAISSVLNDILSRLDKVEAEV |
| | QIDRLITGRLQSLQTYVTQQLIRAAEIRASANLAATKMSECVL |
| | GQSKRVDFCGKGYHLMSFPQSAPHGVVFLHVTYVPAQEKNF |
| | TTAPAICHDGKAHFPREGVFVSNGTHWFVTQRNFYEPQIITTD |
| | NTFVSGNCDVVIGIVNNTVYDPLQPELDSFKEELDKYFKNHTS |
| | PDVDLGDISGINASVVNIQKEIDRLNEVAKNLNESLIDLQELGK |
| | YEQYIKWPWYIWLGFIAGLIAIVMVTIMLCCMTSCCSCLKGCC |
| | SCGSCCKFDEDDSEPVLKGVKLHYT |
| Optimized nucleotide | (SEQ ID NO: 43) |
| sequence encoding a | ATGTTCGTCTTCCTCGTGCTGCTCCCACTCGTTTCTTCCCAG |
| SARS-CoV-2 S protein | TGTGTCAACCTGACAACTAGGACTCAGCTGCCACCAGCCTA |
| with residues 986 and | CACCAACTCCTTCACCAGAGGCGTGTATTACCCAGACAAGG |
| 987 mutated to proline | TGTTTAGAAGCAGCGTGCTGCACTCTACCCAGGACCTCTTT |
| | CTGCCCTTTTTCAGCAACGTGACATGGTTTCACGCAATTCA |
| | CGTGTCCGGCACTAATGGCACAAAGCGGTTCGACAATCCA |
| | GTCCTGCCTTTCAACGATGGCGTCTACTTTGCATCTACTGA |
| | GAAATCCAATATCATTAGGGGATGGATCTTCGGCACAACCC |
| | TGGATTCTAAGACCCAGAGCCTGCTGATCGTCAACAACGCC |
| | ACAAACGTGGTCATTAAGGTTTGCGAGTTTCAGTTCTGTAA |
| | CGATCCTTTTCTGGGCGTGTATTATCATAAGAACAATAAGA |
| | GCTGGATGGAGTCCGAGTTTAGAGTGTATAGCTCTGCAAAT |
| | AATTGTACCTTTGAGTACGTGAGCCAGCCCTTTCTGATGGA |
| | CCTGGAGGGAAAACAAGGAAACTTCAAAAACCTGCGGGAA |
| | TTCGTTTTCAAAAACATCGACGGCTATTTCAAGATCTATAG |
| | CAAGCATACCCCAATCAACCTCGTGAGGGACCTCCCCCAG |
| | GGCTTTAGCGCACTGGAGCCACTGGTTGACCTGCCTATCGG |
| | CATTAATATCACAAGATTTCAGACCCTGCTGGCACTGCATA |
| | GAAGCTATCTGACCCCTGGAGACTCCTCTAGTGGGTGGACT |
| | GCCGGCGCCGCTGCCTACTATGTGGGCTATCTGCAGCCACG |
| | GACATTCCTGCTGAAATACAATGAGAACGGGACAATCACA |
| | GATGCTGTTGATTGCGCACTCGACCCCCTGTCCGAGACAAA |
| | GTGCACTCTCAAGAGCTTTACCGTCGAGAAGGGCATCTATC |
| | AGACCTCAAACTTCAGGGTGCAGCCCACAGAATCTATCGTG |
| | CGCTTCCCTAATATCACTAACCTGTGTCCTTTCGGTGAAGT |
| | GTTCAACGCCACCAGGTTTGCTAGCGTGTATGCCTGGAACA |
| | GGAAGAGGATCTCTAACTGCGTCGCCGACTATTCCGTGCTG |
| | TATAACAGCGCCTCCTTCTCCACATTCAAATGCTATGGAGT |
| | GAGCCCGACAAAACTGAACGATCTCTGCTTTACAAATGTCT |
| | ACGCCGACTCTTTTGTGATCAGAGGGGACGAGGTCCGGCA |
| | GATCGCACCAGGACAGACAGGCAAGATTGCTGACTACAAC |
| | TATAAGCTGCCTGACGACTTCACAGGATGTGTGATCGCATG |
| | GAACTCAAACAATCTGGACTCCAAAGTCGGGGGCAACTAT |
| | AATTACCTGTATCGCCTGTTCCGGAAGTCCAACCTGAAGCC |
| | CTTCGAGAGGGACATCAGTACAGAGATCTATCAGGCTGGC |
| | TCCACCCCTTGCAATGGCGTCGAAGGCTTTAATTGTTATTTT |
| | CCCCTGCAGTCTTACGGGTTTCAGCCTACTAATGGAGTTGG |
| | GTACCAGCCATACAGAGTGGTCGTGCTCAGCTTCGAGCTCC |
| | TGCATGCTCCAGCTACAGTTTGCGGGCCAAAGAAGTCCACT |
| | AACCTGGTGAAGAATAAGTGCGTCAACTTCAACTTTAACGG |
| | GCTCACCGGCACCGGCGTGCTGACTGAGAGCAACAAGAAG |
| | TTTCTGCCATTTCAACAGTTTGGACGGGACATTGCCGACAC |
| | CACCGATGCCGTTCGGGATCCACAGACCCTGGAAATTCTGG |
| | ACATTACACCGTGCAGCTTCGGGGGCGTGAGCGTGATCAC |
| | ACCCGGAACCAATACAAGCAACCAGGTTGCCGTCCTGTATC |
| | AGGATGTCAATTGCACAGAAGTGCCAGTTGCTATCCACGCA |
| | GACCAGCTGACTCCCACATGGCGGGTGTATAGCACCGGAT |
| | CCAACGTGTTTCAGACCCGCGCCGGATGTCTCATTGGGGCC |
| | GAGCACGTGAATAACAGCTACGAGTGCGACATCCCCATTG |
| | GCGCCGGCATTTGTGCGTCTTACCAGACTCAGACCAACTCT |
| | CCTAGAAGGGCCAGGTCCGTTGCTAGTCAGTCTATTATTGC |
| | CTATACCATGAGCCTCGGAGCTGAGAATAGCGTGGCCTACT |
| | CCAATAATTCCATCGCAATCCCTACTAACTTCACTATTTCTG |
| | TGACCACCGAGATCCTGCCTGTGTCTATGACTAAGACTAGC |
| | GTTGATTGTACCATGTATATTTGTGGCGACTCTACCGAATG |
| | TTCTAACCTGCTGCTTCAGTACGGCTCATTTTGCACACAGCT |
| | GAACAGAGCCCTGACTGGGATCGCTGTGGAGCAGGACAAG |
| | AACACACAGGAGGTGTTTGCACAGGTGAAGCAGATCTATA |
| | AGACCCCTCCTATTAAGGATTTCGGCGGATTCAATTTCTCA |
| | CAGATTCTGCCAGACCCCAGTAAGCCTTCCAAGAGGAGCTT |
| | CATCGAGGATCTCCTGTTTAACAAGGTGACCCTGGCAGACG |
| | CCGGCTTTATTAAGCAATATGGGGATTGCCTGGGCGACATT |
| | GCTGCCAGAGACCTGATTTGCGCCCAGAAATTCAATGGCCT |
| | CACAGTGCTGCCACCTCTGCTGACCGACGAGATGATCGCTC |
| | AATACACTAGCGCACTGCTGGCCGGAACCATCACATCAGG |
| | CTGGACCTTCGGGGCCGGAGCAGCACTGCAGATTCCATTCG |
| | CCATGCAGATGGCCTATAGATTCAACGGCATTGGCGTCACA |
| | CAGAACGTGCTGTACGAAAACCAGAAGCTCATCGCTAACC |
| | AGTTTAATTCCGCAATTGGAAAGATCCAAGATTCACTCAGC |
| | TCAACCGCCTCTGCACTCGGAAAGCTGCAGGACGTGGTCA |
| | ACCAGAATGCTCAGGCCCTGAACACACTCGTCAAGCAGCT |
| | GTCCTCTAACTTTGGCGCTATCAGCTCCGTTCTGAACGACA |
| | TTCTGAGCCGCCTGGATCCCCCAGAGGCTGAAGTCCAGATT |
| | GACCGCCTGATTACCGGCCGGCTGCAGTCTCTGCAAACATA |
| | CGTGACCCAGCAGCTGATCAGAGCAGCCGAGATCCGGGCA |
| | TCCGCAAATCTGGCAGCAACTAAGATGAGCGAATGCGTGC |
| | TGGGCCAGTCCAAGCGGGTGGACTTTTGTGGCAAGGGCTA |
| | CCACCTGATGAGCTTCCCCCAGAGCGCCCCACATGGCGTTG |
| | TTTTTCTGCACGTGACCTATGTCCCTGCTCAGGAAAAGAAC |
| | TTTACAACTGCTCCTGCTATCTGCCATGACGGCAAGGCCCA |
| | CTTCCCACGGGAGGGAGTGTTTGTGTCCAATGGCACACACT |
| | GGTTCGTGACCCAGAGGAACTTCTATGAACCCCAGATCATC |
| | ACCACTGACAATACCTTCGTGTCTGGAAATTGCGACGTCGT |
| | GATCGGCATCGTTAACAACACCGTGTACGACCCTCTCCAGC |
| | CAGAGCTGGACTCCTTTAAGGAGGAACTGGATAAGTATTTT |
| | AAGAACCACACAAGCCCAGATGTGGATCTCGGGGACATCT |
| | CCGGAATTAACGCCTCCGTGGTGAATATCCAGAAGGAGAT |
| | TGACCGCCTAAATGAAGTTGCCAAGAACCTCAATGAGTCTC |
| | TGATTGATCTGCAGGAACTGGGCAAGTATGAGCAGTATATC |
| | AAATGGCCCTGGTACATTTGGCTGGGGTTTATCGCCGGACT |
| | GATTGCCATCGTCATGGTGACCATCATGCTGTGTTGCATGA |
| | CCTCCTGTTGTTCCTGTCTGAAGGGCTGCTGTAGTTGCGGCT |
| | CTTGCTGTAAATTCGACGAAGATGATAGCGAGCCCGTGCTG |
| | AAGGGCGTGAAGCTGCATTATACCTGA |
| SARS-CoV-2 S protein | (SEQ ID NO: 10) |
| with residues 986 and | MFVFLVLLPLVSSQCVNLTTRTQLPPAYTNSFTRGVYYPDKVF |
| 987 mutated to proline | RSSVLHSTQDLFLPFFSNVTWFHAIHVSGTNGTKRFDNPVLPF |
| | NDGVYFASTEKSNIIRGWIFGTTLDSKTQSLLIVNNATNVVIKV |
| | CEFQFCNDPFLGVYYHKNNKSWMESEFRVYSSANNCTFEYVS |
| | QPFLMDLEGKQGNFKNLREFVFKNIDGYFKIYSKHTPINLVRD |
| | LPQGFSALEPLVDLPIGINITRFQTLLALHRSYLTPGDSSSGWT |
| | AGAAAYYVGYLQPRTFLLKYNENGTITDAVDCALDPLSETKC |
| | TLKSFTVEKGIYQTSNFRVQPTESIVRFPNITNLCPFGEVFNATR |
| | FASVYAWNRKRISNCVADYSVLYNSASFSTFKCYGVSPTKLN |
| | DLCFTNVYADSFVIRGDEVRQIAPGQTGKIADYNYKLPDDFTG |
| | CVIAWNSNNLDSKVGGNYNYLYRLFRKSNLKPFERDISTEIYQ |
| | AGSTPCNGVEGFNCYFPLQSYGFQPTNGVGYQPYRVVVLSFE |
| | LLHAPATVCGPKKSTNLVKNKCVNFNFNGLTGTGVLTESNKK |
| | FLPFQQFGRDIADTTDAVRDPQTLEILDITPCSFGGVSVITPGTN |
| | TSNQVAVLYQDVNCTEVPVAIHADQLTPTWRVYSTGSNVFQT |
| | RAGCLIGAEHVNNSYECDIPIGAGICASYQTQTNSPRRARSVA |
| | SQSIIAYTMSLGAENSVAYSNNSIAIPTNFTISVTTEILPVSMTK |
| | TSVDCTMYICGDSTECSNLLLQYGSFCTQLNRALTGIAVEQDK |
| | NTQEVFAQVKQIYKTPPIKDFGGFNFSQILPDPSKPSKRSFIEDL |
| | LFNKVTLADAGFIKQYGDCLGDIAARDLICAQKFNGLTVLPPL |
| | LTDEMIAQYTSALLAGTITSGWTFGAGAALQIPFAMQMAYRF |
| | NGIGVTQNVLYENQKLIANQFNSAIGKIQDSLSSTASALGKLQ |
| | DVVNQNAQALNTLVKQLSSNFGAISSVLNDILSRLDPPEAEVQ |
| | IDRLITGRLQSLQTYVTQQLIRAAEIRASANLAATKMSECVLG |
| | QSKRVDFCGKGYHLMSFPQSAPHGVVFLHVTYVPAQEKNFTT |
| | APAICHDGKAHFPREGVFVSNGTHWFVTQRNFYEPQIITTDNT |
| | FVSGNCDVVIGIVNNTVYDPLQPELDSFKEELDKYFKNHTSPD |
| | VDLGDISGINASVVNIQKEIDRLNEVAKNLNESLIDLQELGKYE |
| | QYIKWPWYIWLGFIAGLIAIVMVTIMLCCMTSCCSCLKGCCSC |
| | GSCCKFDEDDSEPVLKGVKLHYT |
| Optimized nucleotide | (SEQ ID NO: 44) |
| sequence encoding a | ATGTTCGTCTTCCTCGTGCTGCTCCCACTCGTTTCTTCCCAG |
| SARS-CoV-2 S protein | TGTGTCAACCTGACAACTAGGACTCAGCTGCCACCAGCCTA |
| mutated to remove a | CACCAACTCCTTCACCAGAGGCGTGTATTACCCAGACAAGG |
| furin cleavage site and | TGTTTAGAAGCAGCGTGCTGCACTCTACCCAGGACCTCTTT |
| to replace residues 986 | CTGCCCTTTTTCAGCAACGTGACATGGTTTCACGCAATTCA |
| and 987 with proline | CGTGTCCGGCACTAATGGCACAAAGCGGTTCGACAATCCA |
| | GTCCTGCCTTTCAACGATGGCGTCTACTTTGCATCTACTGA |
| | GAAATCCAATATCATTAGGGGATGGATCTTCGGCACAACCC |
| | TGGATTCTAAGACCCAGAGCCTGCTGATCGTCAACAACGCC |
| | ACAAACGTGGTCATTAAGGTTTGCGAGTTTCAGTTCTGTAA |
| | CGATCCTTTTCTGGGCGTGTATTATCATAAGAACAATAAGA |
| | GCTGGATGGAGTCCGAGTTTAGAGTGTATAGCTCTGCAAAT |
| | AATTGTACCTTTGAGTACGTGAGCCAGCCCTTTCTGATGGA |
| | CCTGGAGGGAAAACAAGGAAACTTCAAAAACCTGCGGGAA |
| | TTCGTTTTCAAAAACATCGACGGCTATTTCAAGATCTATAG |
| | CAAGCATACCCCAATCAACCTCGTGAGGGACCTCCCCCAG |
| | GGCTTTAGCGCACTGGAGCCACTGGTTGACCTGCCTATCGG |
| | CATTAATATCACAAGATTTCAGACCCTGCTGGCACTGCATA |
| | GAAGCTATCTGACCCCTGGAGACTCCTCTAGTGGGTGGACT |
| | GCCGGCGCCGCTGCCTACTATGTGGGCTATCTGCAGCCACG |
| | GACATTCCTGCTGAAATACAATGAGAACGGGACAATCACA |
| | GATGCTGTTGATTGCGCACTCGACCCCCTGTCCGAGACAAA |
| | GTGCACTCTCAAGAGCTTTACCGTCGAGAAGGGCATCTATC |
| | AGACCTCAAACTTCAGGGTGCAGCCCACAGAATCTATCGTG |
| | CGCTTCCCTAATATCACTAACCTGTGTCCTTTCGGTGAAGT |
| | GTTCAACGCCACCAGGTTTGCTAGCGTGTATGCCTGGAACA |
| | GGAAGAGGATCTCTAACTGCGTCGCCGACTATTCCGTGCTG |
| | TATAACAGCGCCTCCTTCTCCACATTCAAATGCTATGGAGT |
| | GAGCCCGACAAAACTGAACGATCTCTGCTTTACAAATGTCT |
| | ACGCCGACTCTTTTGTGATCAGAGGGGACGAGGTCCGGCA |
| | GATCGCACCAGGACAGACAGGCAAGATTGCTGACTACAAC |
| | TATAAGCTGCCTGACGACTTCACAGGATGTGTGATCGCATG |
| | GAACTCAAACAATCTGGACTCCAAAGTCGGGGGCAACTAT |
| | AATTACCTGTATCGCCTGTTCCGGAAGTCCAACCTGAAGCC |
| | CTTCGAGAGGGACATCAGTACAGAGATCTATCAGGCTGGC |
| | TCCACCCCTTGCAATGGCGTCGAAGGCTTTAATTGTTATTTT |
| | CCCCTGCAGTCTTACGGGTTTCAGCCTACTAATGGAGTTGG |
| | GTACCAGCCATACAGAGTGGTCGTGCTCAGCTTCGAGCTCC |
| | TGCATGCTCCAGCTACAGTTTGCGGGCCAAAGAAGTCCACT |
| | AACCTGGTGAAGAATAAGTGCGTCAACTTCAACTTTAACGG |
| | GCTCACCGGCACCGGCGTGCTGACTGAGAGCAACAAGAAG |
| | TTTCTGCCATTTCAACAGTTTGGACGGGACATTGCCGACAC |
| | CACCGATGCCGTTCGGGATCCACAGACCCTGGAAATTCTGG |
| | ACATTACACCGTGCAGCTTCGGGGGCGTGAGCGTGATCAC |
| | ACCCGGAACCAATACAAGCAACCAGGTTGCCGTCCTGTATC |
| | AGGATGTCAATTGCACAGAAGTGCCAGTTGCTATCCACGCA |
| | GACCAGCTGACTCCCACATGGCGGGTGTATAGCACCGGAT |
| | CCAACGTGTTTCAGACCCGCGCCGGATGTCTCATTGGGGCC |
| | GAGCACGTGAATAACAGCTACGAGTGCGACATCCCCATTG |
| | GCGCCGGCATTTGTGCGTCTTACCAGACTCAGACCAACTCT |
| | CCTGGCTCCGCCTCTTCCGTTGCTAGTCAGTCTATTATTGCC |
| | TATACCATGAGCCTCGGAGCTGAGAATAGCGTGGCCTACTC |
| | CAATAATTCCATCGCAATCCCTACTAACTTCACTATTTCTGT |
| | GACCACCGAGATCCTGCCTGTGTCTATGACTAAGACTAGCG |
| | TTGATTGTACCATGTATATTTGTGGCGACTCTACCGAATGTT |
| | CTAACCTGCTGCTTCAGTACGGCTCATTTTGCACACAGCTG |
| | AACAGAGCCCTGACTGGGATCGCTGTGGAGCAGGACAAGA |
| | ACACACAGGAGGTGTTTGCACAGGTGAAGCAGATCTATAA |
| | GACCCCTCCTATTAAGGATTTCGGCGGATTCAATTTCTCAC |
| | AGATTCTGCCAGACCCCAGTAAGCCTTCCAAGAGGAGCTTC |
| | ATCGAGGATCTCCTGTTTAACAAGGTGACCCTGGCAGACGC |
| | CGGCTTTATTAAGCAATATGGGGATTGCCTGGGCGACATTG |
| | CTGCCAGAGACCTGATTTGCGCCCAGAAATTCAATGGCCTC |
| | ACAGTGCTGCCACCTCTGCTGACCGACGAGATGATCGCTCA |
| | ATACACTAGCGCACTGCTGGCCGGAACCATCACATCAGGCT |
| | GGACCTTCGGGGCCGGAGCAGCACTGCAGATTCCATTCGCC |
| | ATGCAGATGGCCTATAGATTCAACGGCATTGGCGTCACACA |
| | GAACGTGCTGTACGAAAACCAGAAGCTCATCGCTAACCAG |
| | TTTAATTCCGCAATTGGAAAGATCCAAGATTCACTCAGCTC |
| | AACCGCCTCTGCACTCGGAAAGCTGCAGGACGTGGTCAAC |
| | CAGAATGCTCAGGCCCTGAACACACTCGTCAAGCAGCTGTC |
| | CTCTAACTTTGGCGCTATCAGCTCCGTTCTGAACGACATTCT |
| | GAGCCGCCTGGATCCCCCAGAGGCTGAAGTCCAGATTGAC |
| | CGCCTGATTACCGGCCGGCTGCAGTCTCTGCAAACATACGT |
| | GACCCAGCAGCTGATCAGAGCAGCCGAGATCCGGGCATCC |
| | GCAAATCTGGCAGCAACTAAGATGAGCGAATGCGTGCTGG |
| | GCCAGTCCAAGCGGGTGGACTTTTGTGGCAAGGGCTACCA |
| | CCTGATGAGCTTCCCCCAGAGCGCCCCACATGGCGTTGTTT |
| | TTCTGCACGTGACCTATGTCCCTGCTCAGGAAAAGAACTTT |
| | ACAACTGCTCCTGCTATCTGCCATGACGGCAAGGCCCACTT |
| | CCCACGGGAGGGAGTGTTTGTGTCCAATGGCACACACTGGT |
| | TCGTGACCCAGAGGAACTTCTATGAACCCCAGATCATCACC |
| | ACTGACAATACCTTCGTGTCTGGAAATTGCGACGTCGTGAT |
| | CGGCATCGTTAACAACACCGTGTACGACCCTCTCCAGCCAG |
| | AGCTGGACTCCTTTAAGGAGGAACTGGATAAGTATTTTAAG |
| | AACCACACAAGCCCAGATGTGGATCTCGGGGACATCTCCG |
| | GAATTAACGCCTCCGTGGTGAATATCCAGAAGGAGATTGA |
| | CCGCCTAAATGAAGTTGCCAAGAACCTCAATGAGTCTCTGA |
| | TTGATCTGCAGGAACTGGGCAAGTATGAGCAGTATATCAA |
| | ATGGCCCTGGTACATTTGGCTGGGGTTTATCGCCGGACTGA |
| | TTGCCATCGTCATGGTGACCATCATGCTGTGTTGCATGACC |
| | TCCTGTTGTTCCTGTCTGAAGGGCTGCTGTAGTTGCGGCTCT |
| | TGCTGTAAATTCGACGAAGATGATAGCGAGCCCGTGCTGA |
| | AGGGCGTGAAGCTGCATTATACCTGA |
| SARS-CoV-2 S protein | (SEQ ID NO: 11) |
| mutated to remove a | MFVFLVLLPLVSSQCVNLTTRTQLPPAYTNSFTRGVYYPDKVF |
| furin cleavage site and | RSSVLHSTQDLFLPFFSNVTWFHAIHVSGTNGTKRFDNPVLPF |
| to replace residues 986 | NDGVYFASTEKSNIIRGWIFGTTLDSKTQSLLIVNNATNVVIKV |
| and 987 with proline | CEFQFCNDPFLGVYYHKNNKSWMESEFRVYSSANNCTFEYVS |
| | QPFLMDLEGKQGNFKNLREFVFKNIDGYFKIYSKHTPINLVRD |
| | LPQGFSALEPLVDLPIGINITRFQTLLALHRSYLTPGDSSSGWT |
| | AGAAAYYVGYLQPRTFLLKYNENGTITDAVDCALDPLSETKC |
| | TLKSFTVEKGIYQTSNFRVQPTESIVRFPNITNLCPFGEVFNATR |
| | FASVYAWNRKRISNCVADYSVLYNSASFSTFKCYGVSPTKLN |
| | DLCFTNVYADSFVIRGDEVRQIAPGQTGKIADYNYKLPDDFTG |
| | CVIAWNSNNLDSKVGGNYNYLYRLFRKSNLKPFERDISTEIYQ |
| | AGSTPCNGVEGFNCYFPLQSYGFQPTNGVGYQPYRVVVLSFE |
| | LLHAPATVCGPKKSTNLVKNKCVNFNFNGLTGTGVLTESNKK |
| | FLPFQQFGRDIADTTDAVRDPQTLEILDITPCSFGGVSVITPGTN |
| | TSNQVAVLYQDVNCTEVPVAIHADQLTPTWRVYSTGSNVFQT |
| | RAGCLIGAEHVNNSYECDIPIGAGICASYQTQTNSPGSASSVAS |
| | QSIIAYTMSLGAENSVAYSNNSIAIPTNFTISVTTEILPVSMTKT |
| | SVDCTMYICGDSTECSNLLLQYGSFCTQLNRALTGIAVEQDK |
| | NTQEVFAQVKQIYKTPPIKDFGGFNFSQILPDPSKPSKRSFIEDL |
| | LFNKVTLADAGFIKQYGDCLGDIAARDLICAQKFNGLTVLPPL |
| | LTDEMIAQYTSALLAGTITSGWTFGAGAALQIPFAMQMAYRF |
| | NGIGVTQNVLYENQKLIANQFNSAIGKIQDSLSSTASALGKLQ |
| | DVVNQNAQALNTLVKQLSSNFGAISSVLNDILSRLDPPEAEVQ |
| | IDRLITGRLQSLQTYVTQQLIRAAEIRASANLAATKMSECVLG |
| | QSKRVDFCGKGYHLMSFPQSAPHGVVFLHVTYVPAQEKNFTT |
| | APAICHDGKAHFPREGVFVSNGTHWFVTQRNFYEPQIITTDNT |
| | FVSGNCDVVIGIVNNTVYDPLQPELDSFKEELDKYFKNHTSPD |
| | VDLGDISGINASVVNIQKEIDRLNEVAKNLNESLIDLQELGKYE |
| | QYIKWPWYIWLGFIAGLIAIVMVTIMLCCMTSCCSCLKGCCSC |
| | GSCCKFDEDDSEPVLKGVKLHYT |
| Optimized nucleotide | (SEQ ID NO: 45) |
| sequence encoding the | ATGTTCGTCTTCCTCGTGCTGCTCCCACTCGTTTCTTCCCAG |
| ectodomain of a SARS- | TGTGTCAACCTGACAACTAGGACTCAGCTGCCACCAGCCTA |
| CoV-2 S protein | CACCAACTCCTTCACCAGAGGCGTGTATTACCCAGACAAGG |
| mutated to remove a | TGTTTAGAAGCAGCGTGCTGCACTCTACCCAGGACCTCTTT |
| furin cleavage site and | CTGCCCTTTTTCAGCAACGTGACATGGTTTCACGCAATTCA |
| to replace residues 986 | CGTGTCCGGCACTAATGGCACAAAGCGGTTCGACAATCCA |
| and 987 with proline | GTCCTGCCTTTCAACGATGGCGTCTACTTTGCATCTACTGA |
| | GAAATCCAATATCATTAGGGGATGGATCTTCGGCACAACCC |
| | TGGATTCTAAGACCCAGAGCCTGCTGATCGTCAACAACGCC |
| | ACAAACGTGGTCATTAAGGTTTGCGAGTTTCAGTTCTGTAA |
| | CGATCCTTTTCTGGGCGTGTATTATCATAAGAACAATAAGA |
| | GCTGGATGGAGTCCGAGTTTAGAGTGTATAGCTCTGCAAAT |
| | AATTGTACCTTTGAGTACGTGAGCCAGCCCTTTCTGATGGA |
| | CCTGGAGGGAAAACAAGGAAACTTCAAAAACCTGCGGGAA |
| | TTCGTTTTCAAAAACATCGACGGCTATTTCAAGATCTATAG |
| | CAAGCATACCCCAATCAACCTCGTGAGGGACCTCCCCCAG |
| | GGCTTTAGCGCACTGGAGCCACTGGTTGACCTGCCTATCGG |
| | CATTAATATCACAAGATTTCAGACCCTGCTGGCACTGCATA |
| | GAAGCTATCTGACCCCTGGAGACTCCTCTAGTGGGTGGACT |
| | GCCGGCGCCGCTGCCTACTATGTGGGCTATCTGCAGCCACG |
| | GACATTCCTGCTGAAATACAATGAGAACGGGACAATCACA |
| | GATGCTGTTGATTGCGCACTCGACCCCCTGTCCGAGACAAA |
| | GTGCACTCTCAAGAGCTTTACCGTCGAGAAGGGCATCTATC |
| | AGACCTCAAACTTCAGGGTGCAGCCCACAGAATCTATCGTG |
| | CGCTTCCCTAATATCACTAACCTGTGTCCTTTCGGTGAAGT |
| | GTTCAACGCCACCAGGTTTGCTAGCGTGTATGCCTGGAACA |
| | GGAAGAGGATCTCTAACTGCGTCGCCGACTATTCCGTGCTG |
| | TATAACAGCGCCTCCTTCTCCACATTCAAATGCTATGGAGT |
| | GAGCCCGACAAAACTGAACGATCTCTGCTTTACAAATGTCT |
| | ACGCCGACTCTTTTGTGATCAGAGGGGACGAGGTCCGGCA |
| | GATCGCACCAGGACAGACAGGCAAGATTGCTGACTACAAC |
| | TATAAGCTGCCTGACGACTTCACAGGATGTGTGATCGCATG |
| | GAACTCAAACAATCTGGACTCCAAAGTCGGGGGCAACTAT |
| | AATTACCTGTATCGCCTGTTCCGGAAGTCCAACCTGAAGCC |
| | CTTCGAGAGGGACATCAGTACAGAGATCTATCAGGCTGGC |
| | TCCACCCCTTGCAATGGCGTCGAAGGCTTTAATTGTTATTTT |
| | CCCCTGCAGTCTTACGGGTTTCAGCCTACTAATGGAGTTGG |
| | GTACCAGCCATACAGAGTGGTCGTGCTCAGCTTCGAGCTCC |
| | TGCATGCTCCAGCTACAGTTTGCGGGCCAAAGAAGTCCACT |
| | AACCTGGTGAAGAATAAGTGCGTCAACTTCAACTTTAACGG |
| | GCTCACCGGCACCGGCGTGCTGACTGAGAGCAACAAGAAG |
| | TTTCTGCCATTTCAACAGTTTGGACGGGACATTGCCGACAC |
| | CACCGATGCCGTTCGGGATCCACAGACCCTGGAAATTCTGG |
| | ACATTACACCGTGCAGCTTCGGGGGCGTGAGCGTGATCAC |
| | ACCCGGAACCAATACAAGCAACCAGGTTGCCGTCCTGTATC |
| | AGGATGTCAATTGCACAGAAGTGCCAGTTGCTATCCACGCA |
| | GACCAGCTGACTCCCACATGGCGGGTGTATAGCACCGGAT |
| | CCAACGTGTTTCAGACCCGCGCCGGATGTCTCATTGGGGCC |
| | GAGCACGTGAATAACAGCTACGAGTGCGACATCCCCATTG |
| | GCGCCGGCATTTGTGCGTCTTACCAGACTCAGACCAACTCT |
| | CCTGGCTCCGCCTCTTCCGTTGCTAGTCAGTCTATTATTGCC |
| | TATACCATGAGCCTCGGAGCTGAGAATAGCGTGGCCTACTC |
| | CAATAATTCCATCGCAATCCCTACTAACTTCACTATTTCTGT |
| | GACCACCGAGATCCTGCCTGTGTCTATGACTAAGACTAGCG |
| | TTGATTGTACCATGTATATTTGTGGCGACTCTACCGAATGTT |
| | CTAACCTGCTGCTTCAGTACGGCTCATTTTGCACACAGCTG |
| | AACAGAGCCCTGACTGGGATCGCTGTGGAGCAGGACAAGA |
| | ACACACAGGAGGTGTTTGCACAGGTGAAGCAGATCTATAA |
| | GACCCCTCCTATTAAGGATTTCGGCGGATTCAATTTCTCAC |
| | AGATTCTGCCAGACCCCAGTAAGCCTTCCAAGAGGAGCTTC |
| | ATCGAGGATCTCCTGTTTAACAAGGTGACCCTGGCAGACGC |
| | CGGCTTTATTAAGCAATATGGGGATTGCCTGGGCGACATTG |
| | CTGCCAGAGACCTGATTTGCGCCCAGAAATTCAATGGCCTC |
| | ACAGTGCTGCCACCTCTGCTGACCGACGAGATGATCGCTCA |
| | ATACACTAGCGCACTGCTGGCCGGAACCATCACATCAGGCT |
| | GGACCTTCGGGGCCGGAGCAGCACTGCAGATTCCATTCGCC |
| | ATGCAGATGGCCTATAGATTCAACGGCATTGGCGTCACACA |
| | GAACGTGCTGTACGAAAACCAGAAGCTCATCGCTAACCAG |
| | TTTAATTCCGCAATTGGAAAGATCCAAGATTCACTCAGCTC |
| | AACCGCCTCTGCACTCGGAAAGCTGCAGGACGTGGTCAAC |
| | CAGAATGCTCAGGCCCTGAACACACTCGTCAAGCAGCTGTC |
| | CTCTAACTTTGGCGCTATCAGCTCCGTTCTGAACGACATTCT |
| | GAGCCGCCTGGATCCCCCAGAGGCTGAAGTCCAGATTGAC |
| | CGCCTGATTACCGGCCGGCTGCAGTCTCTGCAAACATACGT |
| | GACCCAGCAGCTGATCAGAGCAGCCGAGATCCGGGCATCC |
| | GCAAATCTGGCAGCAACTAAGATGAGCGAATGCGTGCTGG |
| | GCCAGTCCAAGCGGGTGGACTTTTGTGGCAAGGGCTACCA |
| | CCTGATGAGCTTCCCCCAGAGCGCCCCACATGGCGTTGTTT |
| | TTCTGCACGTGACCTATGTCCCTGCTCAGGAAAAGAACTTT |
| | ACAACTGCTCCTGCTATCTGCCATGACGGCAAGGCCCACTT |
| | CCCACGGGAGGGAGTGTTTGTGTCCAATGGCACACACTGGT |
| | TCGTGACCCAGAGGAACTTCTATGAACCCCAGATCATCACC |
| | ACTGACAATACCTTCGTGTCTGGAAATTGCGACGTCGTGAT |
| | CGGCATCGTTAACAACACCGTGTACGACCCTCTCCAGCCAG |
| | AGCTGGACTCCTTTAAGGAGGAACTGGATAAGTATTTTAAG |
| | AACCACACAAGCCCAGATGTGGATCTCGGGGACATCTCCG |
| | GAATTAACGCCTCCGTGGTGAATATCCAGAAGGAGATTGA |
| | CCGCCTAAATGAAGTTGCCAAGAACCTCAATGAGTCTCTGA |
| | TTGATCTGCAGGAACTGGGCAAGTATGAGCAGTGA |
| SARS-CoV-2 S protein | (SEQ ID NO: 118) |
| with residues 986 and | MFVFLVLLPLVSSQCVNLTTRTQLPPAYTNSFTRGVYYPDKVF |
| 987 mutated to proline, | RSSVLHSTQDLFLPFFSNVTWFHAIHVSGTNGTKRFDNPVLPF |
| and to contain the | NDGVYFASTEKSNIIRGWIFGTTLDSKTQSLLIVNNATNVVIKV |
| D614G mutation | CEFQFCNDPFLGVYYHKNNKSWMESEFRVYSSANNCTFEYVS |
| | QPFLMDLEGKQGNFKNLREFVFKNIDGYFKIYSKHTPINLVRD |
| | LPQGFSALEPLVDLPIGINITRFQTLLALHRSYLTPGDSSSGWT |
| | AGAAAYYVGYLQPRTFLLKYNENGTITDAVDCALDPLSETKC |
| | TLKSFTVEKGIYQTSNFRVQPTESIVRFPNITNLCPFGEVFNATR |
| | FASVYAWNRKRISNCVADYSVLYNSASFSTFKCYGVSPTKLN |
| | DLCFTNVYADSFVIRGDEVRQIAPGQTGKIADYNYKLPDDFTG |
| | CVIAWNSNNLDSKVGGNYNYLYRLFRKSNLKPFERDISTEIYQ |
| | AGSTPCNGVEGFNCYFPLQSYGFQPTNGVGYQPYRVVVLSFE |
| | LLHAPATVCGPKKSTNLVKNKCVNFNFNGLTGTGVLTESNKK |
| | FLPFQQFGRDIADTTDAVRDPQTLEILDITPCSFGGVSVITPGTN |
| | TSNQVAVLYQDVNCTEVPVAIHADQLTPTWRVYSTGSNVFQT |
| | RAGCLIGAEHVNNSYECDIPIGAGICASYQTQTNSPRRARSVA |
| | SQSIIAYTMSLGAENSVAYSNNSIAIPTNFTISVTTEILPVSMTK |
| | TSVDCTMYICGDSTECSNLLLQYGSFCTQLNRALTGIAVEQDK |
| | NTQEVFAQVKQIYKTPPIKDFGGFNFSQILPDPSKPSKRSFIEDL |
| | LFNKVTLADAGFIKQYGDCLGDIAARDLICAQKFNGLTVLPPL |
| | LTDEMIAQYTSALLAGTITSGWTFGAGAALQIPFAMQMAYRF |
| | NGIGVTQNVLYENQKLIANQFNSAIGKIQDSLSSTASALGKLQ |
| | DVVNQNAQALNTLVKQLSSNFGAISSVLNDILSRLDPPEAEVQ |
| | IDRLITGRLQSLQTYVTQQLIRAAEIRASANLAATKMSECVLG |
| | QSKRVDFCGKGYHLMSFPQSAPHGVVFLHVTYVPAQEKNFTT |
| | APAICHDGKAHFPREGVFVSNGTHWFVTQRNFYEPQIITTDNT |
| | FVSGNCDVVIGIVNNTVYDPLQPELDSFKEELDKYFKNHTSPD |
| | VDLGDISGINASVVNIQKEIDRLNEVAKNLNESLIDLQELGKYE |
| | QYIKWPWYIWLGFIAGLIAIVMVTIMLCCMTSCCSCLKGCCSC |
| | GSCCKFDEDDSEPVLKGVKLHYT |
| Optimized nucleotide | (SEQ ID NO: 119) |
| sequence encoding | ATGTTCGTCTTCCTCGTGCTGCTCCCACTCGTTTCTTCCCAG |
| SARS-CoV-2 S protein | TGTGTCAACCTGACAACTAGGACTCAGCTGCCACCAGCCTA |
| with residues 986 and | CACCAACTCCTTCACCAGAGGCGTGTATTACCCAGACAAGG |
| 987 mutated to proline, | TGTTTAGAAGCAGCGTGCTGCACTCTACCCAGGACCTCTTT |
| and to contain the | CTGCCCTTTTTCAGCAACGTGACATGGTTTCACGCAATTCA |
| D614G mutation* | CGTGTCCGGCACTAATGGCACAAAGCGGTTCGACAATCCA |
| *underlined residues | GTCCTGCCTTTCAACGATGGCGTCTACTTTGCATCTACTGA |
| correspond to D614G | GAAATCCAATATCATTAGGGGATGGATCTTCGGCACAACCC |
| mutation location | TGGATTCTAAGACCCAGAGCCTGCTGATCGTCAACAACGCC |
| | ACAAACGTGGTCATTAAGGTTTGCGAGTTTCAGTTCTGTAA |
| | CGATCCTTTTCTGGGCGTGTATTATCATAAGAACAATAAGA |
| | GCTGGATGGAGTCCGAGTTTAGAGTGTATAGCTCTGCAAAT |
| | AATTGTACCTTTGAGTACGTGAGCCAGCCCTTTCTGATGGA |
| | CCTGGAGGGAAAACAAGGAAACTTCAAAAACCTGCGGGAA |
| | TTCGTTTTCAAAAACATCGACGGCTATTTCAAGATCTATAG |
| | CAAGCATACCCCAATCAACCTCGTGAGGGACCTCCCCCAG |
| | GGCTTTAGCGCACTGGAGCCACTGGTTGACCTGCCTATCGG |
| | CATTAATATCACAAGATTTCAGACCCTGCTGGCACTGCATA |
| | GAAGCTATCTGACCCCTGGAGACTCCTCTAGTGGGTGGACT |
| | GCCGGCGCCGCTGCCTACTATGTGGGCTATCTGCAGCCACG |
| | GACATTCCTGCTGAAATACAATGAGAACGGGACAATCACA |
| | GATGCTGTTGATTGCGCACTCGACCCCCTGTCCGAGACAAA |
| | GTGCACTCTCAAGAGCTTTACCGTCGAGAAGGGCATCTATC |
| | AGACCTCAAACTTCAGGGTGCAGCCCACAGAATCTATCGTG |
| | CGCTTCCCTAATATCACTAACCTGTGTCCTTTCGGTGAAGT |
| | GTTCAACGCCACCAGGTTTGCTAGCGTGTATGCCTGGAACA |
| | GGAAGAGGATCTCTAACTGCGTCGCCGACTATTCCGTGCTG |
| | TATAACAGCGCCTCCTTCTCCACATTCAAATGCTATGGAGT |
| | GAGCCCGACAAAACTGAACGATCTCTGCTTTACAAATGTCT |
| | ACGCCGACTCTTTTGTGATCAGAGGGGACGAGGTCCGGCA |
| | GATCGCACCAGGACAGACAGGCAAGATTGCTGACTACAAC |
| | TATAAGCTGCCTGACGACTTCACAGGATGTGTGATCGCATG |
| | GAACTCAAACAATCTGGACTCCAAAGTCGGGGGCAACTAT |
| | AATTACCTGTATCGCCTGTTCCGGAAGTCCAACCTGAAGCC |
| | CTTCGAGAGGGACATCAGTACAGAGATCTATCAGGCTGGC |
| | TCCACCCCTTGCAATGGCGTCGAAGGCTTTAATTGTTATTTT |
| | CCCCTGCAGTCTTACGGGTTTCAGCCTACTAATGGAGTTGG |
| | GTACCAGCCATACAGAGTGGTCGTGCTCAGCTTCGAGCTCC |
| | TGCATGCTCCAGCTACAGTTTGCGGGCCAAAGAAGTCCACT |
| | AACCTGGTGAAGAATAAGTGCGTCAACTTCAACTTTAACGG |
| | GCTCACCGGCACCGGCGTGCTGACTGAGAGCAACAAGAAG |
| | TTTCTGCCATTTCAACAGTTTGGACGGGACATTGCCGACAC |
| | CACCGATGCCGTTCGGGATCCACAGACCCTGGAAATTCTGG |
| | ACATTACACCGTGCAGCTTCGGGGGCGTGAGCGTGATCAC |
| | ACCCGGAACCAATACAAGCAACCAGGTTGCCGTCCTGTATC |
| | AGGGCGTCAATTGCACAGAAGTGCCAGTTGCTATCCACGC |
| | AGACCAGCTGACTCCCACATGGCGGGTGTATAGCACCGGA |
| | TCCAACGTGTTTCAGACCCGCGCCGGATGTCTCATTGGGGC |
| | CGAGCACGTGAATAACAGCTACGAGTGCGACATCCCCATT |
| | GGCGCCGGCATTTGTGCGTCTTACCAGACTCAGACCAACTC |
| | TCCTAGAAGGGCCAGGTCCGTTGCTAGTCAGTCTATTATTG |
| | CCTATACCATGAGCCTCGGAGCTGAGAATAGCGTGGCCTAC |
| | TCCAATAATTCCATCGCAATCCCTACTAACTTCACTATTTCT |
| | GTGACCACCGAGATCCTGCCTGTGTCTATGACTAAGACTAG |
| | CGTTGATTGTACCATGTATATTTGTGGCGACTCTACCGAAT |
| | GTTCTAACCTGCTGCTTCAGTACGGCTCATTTTGCACACAG |
| | CTGAACAGAGCCCTGACTGGGATCGCTGTGGAGCAGGACA |
| | AGAACACACAGGAGGTGTTTGCACAGGTGAAGCAGATCTA |
| | TAAGACCCCTCCTATTAAGGATTTCGGCGGATTCAATTTCT |
| | CACAGATTCTGCCAGACCCCAGTAAGCCTTCCAAGAGGAG |
| | CTTCATCGAGGATCTCCTGTTTAACAAGGTGACCCTGGCAG |
| | ACGCCGGCTTTATTAAGCAATATGGGGATTGCCTGGGCGAC |
| | ATTGCTGCCAGAGACCTGATTTGCGCCCAGAAATTCAATGG |
| | CCTCACAGTGCTGCCACCTCTGCTGACCGACGAGATGATCG |
| | CTCAATACACTAGCGCACTGCTGGCCGGAACCATCACATCA |
| | GGCTGGACCTTCGGGGCCGGAGCAGCACTGCAGATTCCATT |
| | CGCCATGCAGATGGCCTATAGATTCAACGGCATTGGCGTCA |
| | CACAGAACGTGCTGTACGAAAACCAGAAGCTCATCGCTAA |
| | CCAGTTTAATTCCGCAATTGGAAAGATCCAAGATTCACTCA |
| | GCTCAACCGCCTCTGCACTCGGAAAGCTGCAGGACGTGGTC |
| | AACCAGAATGCTCAGGCCCTGAACACACTCGTCAAGCAGC |
| | TGTCCTCTAACTTTGGCGCTATCAGCTCCGTTCTGAACGAC |
| | ATTCTGAGCCGCCTGGATCCCCCAGAGGCTGAAGTCCAGAT |
| | TGACCGCCTGATTACCGGCCGGCTGCAGTCTCTGCAAACAT |
| | ACGTGACCCAGCAGCTGATCAGAGCAGCCGAGATCCGGGC |
| | ATCCGCAAATCTGGCAGCAACTAAGATGAGCGAATGCGTG |
| | CTGGGCCAGTCCAAGCGGGTGGACTTTTGTGGCAAGGGCT |
| | ACCACCTGATGAGCTTCCCCCAGAGCGCCCCACATGGCGTT |
| | GTTTTTCTGCACGTGACCTATGTCCCTGCTCAGGAAAAGAA |
| | CTTTACAACTGCTCCTGCTATCTGCCATGACGGCAAGGCCC |
| | ACTTCCCACGGGAGGGAGTGTTTGTGTCCAATGGCACACAC |
| | TGGTTCGTGACCCAGAGGAACTTCTATGAACCCCAGATCAT |
| | CACCACTGACAATACCTTCGTGTCTGGAAATTGCGACGTCG |
| | TGATCGGCATCGTTAACAACACCGTGTACGACCCTCTCCAG |
| | CCAGAGCTGGACTCCTTTAAGGAGGAACTGGATAAGTATTT |
| | TAAGAACCACACAAGCCCAGATGTGGATCTCGGGGACATC |
| | TCCGGAATTAACGCCTCCGTGGTGAATATCCAGAAGGAGA |
| | TTGACCGCCTAAATGAAGTTGCCAAGAACCTCAATGAGTCT |
| | CTGATTGATCTGCAGGAACTGGGCAAGTATGAGCAGTATAT |
| | CAAATGGCCCTGGTACATTTGGCTGGGGTTTATCGCCGGAC |
| | TGATTGCCATCGTCATGGTGACCATCATGCTGTGTTGCATG |
| | ACCTCCTGTTGTTCCTGTCTGAAGGGCTGCTGTAGTTGCGG |
| | CTCTTGCTGTAAATTCGACGAAGATGATAGCGAGCCCGTGC |
| | TGAAGGGCGTGAAGCTGCATTATACCTGA |
| SARS-CoV-2 S protein | (SEQ ID NO: 120) |
| mutated to remove a | MFVFLVLLPLVSSQCVNLTTRTQLPPAYTNSFTRGVYYPDKVF |
| furin cleavage site and | RSSVLHSTQDLFLPFFSNVTWFHAIHVSGTNGTKRFDNPVLPF |
| to replace residues 986 | NDGVYFASTEKSNIIRGWIFGTTLDSKTQSLLIVNNATNVVIKV |
| and 987 with proline, | CEFQFCNDPFLGVYYHKNNKSWMESEFRVYSSANNCTFEYVS |
| and to contain the | QPFLMDLEGKQGNFKNLREFVFKNIDGYFKIYSKHTPINLVRD |
| D614G mutation | LPQGFSALEPLVDLPIGINITRFQTLLALHRSYLTPGDSSSGWT |
| | AGAAAYYVGYLQPRTFLLKYNENGTITDAVDCALDPLSETKC |
| | TLKSFTVEKGIYQTSNFRVQPTESIVRFPNITNLCPFGEVFNATR |
| | FASVYAWNRKRISNCVADYSVLYNSASFSTFKCYGVSPTKLN |
| | DLCFTNVYADSFVIRGDEVRQIAPGQTGKIADYNYKLPDDFTG |
| | CVIAWNSNNLDSKVGGNYNYLYRLFRKSNLKPFERDISTEIYQ |
| | AGSTPCNGVEGFNCYFPLQSYGFQPTNGVGYQPYRVVVLSFE |
| | LLHAPATVCGPKKSTNLVKNKCVNFNFNGLTGTGVLTESNKK |
| | FLPFQQFGRDIADTTDAVRDPQTLEILDITPCSFGGVSVITPGTN |
| | TSNQVAVLYQGVNCTEVPVAIHADQLTPTWRVYSTGSNVFQT |
| | RAGCLIGAEHVNNSYECDIPIGAGICASYQTQTNSPGSASSVAS |
| | QSIIAYTMSLGAENSVAYSNNSIAIPTNFTISVTTEILPVSMTKT |
| | SVDCTMYICGDSTECSNLLLQYGSFCTQLNRALTGIAVEQDK |
| | NTQEVFAQVKQIYKTPPIKDFGGFNFSQILPDPSKPSKRSFIEDL |
| | LFNKVTLADAGFIKQYGDCLGDIAARDLICAQKFNGLTVLPPL |
| | LTDEMIAQYTSALLAGTITSGWTFGAGAALQIPFAMQMAYRF |
| | NGIGVTQNVLYENQKLIANQFNSAIGKIQDSLSSTASALGKLQ |
| | DVVNQNAQALNTLVKQLSSNFGAISSVLNDILSRLDPPEAEVQ |
| | IDRLITGRLQSLQTYVTQQLIRAAEIRASANLAATKMSECVLG |
| | QSKRVDFCGKGYHLMSFPQSAPHGVVFLHVTYVPAQEKNFTT |
| | APAICHDGKAHFPREGVFVSNGTHWFVTQRNFYEPQIITTDNT |
| | FVSGNCDVVIGIVNNTVYDPLQPELDSFKEELDKYFKNHTSPD |
| | VDLGDISGINASVVNIQKEIDRLNEVAKNLNESLIDLQELGKYE |
| | QYIKWPWYIWLGFIAGLIAIVMVTIMLCCMTSCCSCLKGCCSC |
| | GSCCKFDEDDSEPVLKGVKLHYT |
| Optimized nucleotide | (SEQ ID NO: 121) |
| sequence encoding | ATGTTCGTCTTCCTCGTGCTGCTCCCACTCGTTTCTTCCCAG |
| SARS-CoV-2 S protein | TGTGTCAACCTGACAACTAGGACTCAGCTGCCACCAGCCTA |
| mutated to remove a | CACCAACTCCTTCACCAGAGGCGTGTATTACCCAGACAAGG |
| furin cleavage site and | TGTTTAGAAGCAGCGTGCTGCACTCTACCCAGGACCTCTTT |
| to replace residues 986 | CTGCCCTTTTTCAGCAACGTGACATGGTTTCACGCAATTCA |
| and 987 with proline, | CGTGTCCGGCACTAATGGCACAAAGCGGTTCGACAATCCA |
| and to contain the | GTCCTGCCTTTCAACGATGGCGTCTACTTTGCATCTACTGA |
| D614G mutation* | GAAATCCAATATCATTAGGGGATGGATCTTCGGCACAACCC |
| *underlined residues | TGGATTCTAAGACCCAGAGCCTGCTGATCGTCAACAACGCC |
| correspond to D614G | ACAAACGTGGTCATTAAGGTTTGCGAGTTTCAGTTCTGTAA |
| mutation location | CGATCCTTTTCTGGGCGTGTATTATCATAAGAACAATAAGA |
| | GCTGGATGGAGTCCGAGTTTAGAGTGTATAGCTCTGCAAAT |
| | AATTGTACCTTTGAGTACGTGAGCCAGCCCTTTCTGATGGA |
| | CCTGGAGGGAAAACAAGGAAACTTCAAAAACCTGCGGGAA |
| | TTCGTTTTCAAAAACATCGACGGCTATTTCAAGATCTATAG |
| | CAAGCATACCCCAATCAACCTCGTGAGGGACCTCCCCCAG |
| | GGCTTTAGCGCACTGGAGCCACTGGTTGACCTGCCTATCGG |
| | CATTAATATCACAAGATTTCAGACCCTGCTGGCACTGCATA |
| | GAAGCTATCTGACCCCTGGAGACTCCTCTAGTGGGTGGACT |
| | GCCGGCGCCGCTGCCTACTATGTGGGCTATCTGCAGCCACG |
| | GACATTCCTGCTGAAATACAATGAGAACGGGACAATCACA |
| | GATGCTGTTGATTGCGCACTCGACCCCCTGTCCGAGACAAA |
| | GTGCACTCTCAAGAGCTTTACCGTCGAGAAGGGCATCTATC |
| | AGACCTCAAACTTCAGGGTGCAGCCCACAGAATCTATCGTG |
| | CGCTTCCCTAATATCACTAACCTGTGTCCTTTCGGTGAAGT |
| | GTTCAACGCCACCAGGTTTGCTAGCGTGTATGCCTGGAACA |
| | GGAAGAGGATCTCTAACTGCGTCGCCGACTATTCCGTGCTG |
| | TATAACAGCGCCTCCTTCTCCACATTCAAATGCTATGGAGT |
| | GAGCCCGACAAAACTGAACGATCTCTGCTTTACAAATGTCT |
| | ACGCCGACTCTTTTGTGATCAGAGGGGACGAGGTCCGGCA |
| | GATCGCACCAGGACAGACAGGCAAGATTGCTGACTACAAC |
| | TATAAGCTGCCTGACGACTTCACAGGATGTGTGATCGCATG |
| | GAACTCAAACAATCTGGACTCCAAAGTCGGGGGCAACTAT |
| | AATTACCTGTATCGCCTGTTCCGGAAGTCCAACCTGAAGCC |
| | CTTCGAGAGGGACATCAGTACAGAGATCTATCAGGCTGGC |
| | TCCACCCCTTGCAATGGCGTCGAAGGCTTTAATTGTTATTTT |
| | CCCCTGCAGTCTTACGGGTTTCAGCCTACTAATGGAGTTGG |
| | GTACCAGCCATACAGAGTGGTCGTGCTCAGCTTCGAGCTCC |
| | TGCATGCTCCAGCTACAGTTTGCGGGCCAAAGAAGTCCACT |
| | AACCTGGTGAAGAATAAGTGCGTCAACTTCAACTTTAACGG |
| | GCTCACCGGCACCGGCGTGCTGACTGAGAGCAACAAGAAG |
| | TTTCTGCCATTTCAACAGTTTGGACGGGACATTGCCGACAC |
| | CACCGATGCCGTTCGGGATCCACAGACCCTGGAAATTCTGG |
| | ACATTACACCGTGCAGCTTCGGGGGCGTGAGCGTGATCAC |
| | ACCCGGAACCAATACAAGCAACCAGGTTGCCGTCCTGTATC |
| | AGGGCGTCAATTGCACAGAAGTGCCAGTTGCTATCCACGC |
| | AGACCAGCTGACTCCCACATGGCGGGTGTATAGCACCGGA |
| | TCCAACGTGTTTCAGACCCGCGCCGGATGTCTCATTGGGGC |
| | CGAGCACGTGAATAACAGCTACGAGTGCGACATCCCCATT |
| | GGCGCCGGCATTTGTGCGTCTTACCAGACTCAGACCAACTC |
| | TCCTGGCTCCGCCTCTTCCGTTGCTAGTCAGTCTATTATTGC |
| | CTATACCATGAGCCTCGGAGCTGAGAATAGCGTGGCCTACT |
| | CCAATAATTCCATCGCAATCCCTACTAACTTCACTATTTCTG |
| | TGACCACCGAGATCCTGCCTGTGTCTATGACTAAGACTAGC |
| | GTTGATTGTACCATGTATATTTGTGGCGACTCTACCGAATG |
| | TTCTAACCTGCTGCTTCAGTACGGCTCATTTTGCACACAGCT |
| | GAACAGAGCCCTGACTGGGATCGCTGTGGAGCAGGACAAG |
| | AACACACAGGAGGTGTTTGCACAGGTGAAGCAGATCTATA |
| | AGACCCCTCCTATTAAGGATTTCGGCGGATTCAATTTCTCA |
| | CAGATTCTGCCAGACCCCAGTAAGCCTTCCAAGAGGAGCTT |
| | CATCGAGGATCTCCTGTTTAACAAGGTGACCCTGGCAGACG |
| | CCGGCTTTATTAAGCAATATGGGGATTGCCTGGGCGACATT |
| | GCTGCCAGAGACCTGATTTGCGCCCAGAAATTCAATGGCCT |
| | CACAGTGCTGCCACCTCTGCTGACCGACGAGATGATCGCTC |
| | AATACACTAGCGCACTGCTGGCCGGAACCATCACATCAGG |
| | CTGGACCTTCGGGGCCGGAGCAGCACTGCAGATTCCATTCG |
| | CCATGCAGATGGCCTATAGATTCAACGGCATTGGCGTCACA |
| | CAGAACGTGCTGTACGAAAACCAGAAGCTCATCGCTAACC |
| | AGTTTAATTCCGCAATTGGAAAGATCCAAGATTCACTCAGC |
| | TCAACCGCCTCTGCACTCGGAAAGCTGCAGGACGTGGTCA |
| | ACCAGAATGCTCAGGCCCTGAACACACTCGTCAAGCAGCT |
| | GTCCTCTAACTTTGGCGCTATCAGCTCCGTTCTGAACGACA |
| | TTCTGAGCCGCCTGGATCCCCCAGAGGCTGAAGTCCAGATT |
| | GACCGCCTGATTACCGGCCGGCTGCAGTCTCTGCAAACATA |
| | CGTGACCCAGCAGCTGATCAGAGCAGCCGAGATCCGGGCA |
| | TCCGCAAATCTGGCAGCAACTAAGATGAGCGAATGCGTGC |
| | TGGGCCAGTCCAAGCGGGTGGACTTTTGTGGCAAGGGCTA |
| | CCACCTGATGAGCTTCCCCCAGAGCGCCCCACATGGCGTTG |
| | TTTTTCTGCACGTGACCTATGTCCCTGCTCAGGAAAAGAAC |
| | TTTACAACTGCTCCTGCTATCTGCCATGACGGCAAGGCCCA |
| | CTTCCCACGGGAGGGAGTGTTTGTGTCCAATGGCACACACT |
| | GGTTCGTGACCCAGAGGAACTTCTATGAACCCCAGATCATC |
| | ACCACTGACAATACCTTCGTGTCTGGAAATTGCGACGTCGT |
| | GATCGGCATCGTTAACAACACCGTGTACGACCCTCTCCAGC |
| | CAGAGCTGGACTCCTTTAAGGAGGAACTGGATAAGTATTTT |
| | AAGAACCACACAAGCCCAGATGTGGATCTCGGGGACATCT |
| | CCGGAATTAACGCCTCCGTGGTGAATATCCAGAAGGAGAT |
| | TGACCGCCTAAATGAAGTTGCCAAGAACCTCAATGAGTCTC |
| | TGATTGATCTGCAGGAACTGGGCAAGTATGAGCAGTATATC |
| | AAATGGCCCTGGTACATTTGGCTGGGGTTTATCGCCGGACT |
| | GATTGCCATCGTCATGGTGACCATCATGCTGTGTTGCATGA |
| | CCTCCTGTTGTTCCTGTCTGAAGGGCTGCTGTAGTTGCGGCT |
| | CTTGCTGTAAATTCGACGAAGATGATAGCGAGCCCGTGCTG |
| | AAGGGCGTGAAGCTGCATTATACCTGA |
| Ectodomain of a SARS- | (SEQ ID NO: 12) |
| CoV-2 S protein | MFVFLVLLPLVSSQCVNLTTRTQLPPAYTNSFTRGVYYPDKVF |
| mutated to remove a | RSSVLHSTQDLFLPFFSNVTWFHAIHVSGTNGTKRFDNPVLPF |
| furin cleavage site and | NDGVYFASTEKSNIIRGWIFGTTLDSKTQSLLIVNNATNVVIKV |
| to replace residues 986 | CEFQFCNDPFLGVYYHKNNKSWMESEFRVYSSANNCTFEYVS |
| and 987 with proline | QPFLMDLEGKQGNFKNLREFVFKNIDGYFKIYSKHTPINLVRD |
| | LPQGFSALEPLVDLPIGINITRFQTLLALHRSYLTPGDSSSGWT |
| | AGAAAYYVGYLQPRTFLLKYNENGTITDAVDCALDPLSETKC |
| | TLKSFTVEKGIYQTSNFRVQPTESIVRFPNITNLCPFGEVFNATR |
| | FASVYAWNRKRISNCVADYSVLYNSASFSTFKCYGVSPTKLN |
| | DLCFTNVYADSFVIRGDEVRQIAPGQTGKIADYNYKLPDDFTG |
| | CVIAWNSNNLDSKVGGNYNYLYRLFRKSNLKPFERDISTEIYQ |
| | AGSTPCNGVEGFNCYFPLQSYGFQPTNGVGYQPYRVVVLSFE |
| | LLHAPATVCGPKKSTNLVKNKCVNFNFNGLTGTGVLTESNKK |
| | FLPFQQFGRDIADTTDAVRDPQTLEILDITPCSFGGVSVITPGTN |
| | TSNQVAVLYQDVNCTEVPVAIHADQLTPTWRVYSTGSNVFQT |
| | RAGCLIGAEHVNNSYECDIPIGAGICASYQTQTNSPGSASSVAS |
| | QSIIAYTMSLGAENSVAYSNNSIAIPTNFTISVTTEILPVSMTKT |
| | SVDCTMYICGDSTECSNLLLQYGSFCTQLNRALTGIAVEQDK |
| | NTQEVFAQVKQIYKTPPIKDFGGFNFSQILPDPSKPSKRSFIEDL |
| | LFNKVTLADAGFIKQYGDCLGDIAARDLICAQKFNGLTVLPPL |
| | LTDEMIAQYTSALLAGTITSGWTFGAGAALQIPFAMQMAYRF |
| | NGIGVTQNVLYENQKLIANQFNSAIGKIQDSLSSTASALGKLQ |
| | DVVNQNAQALNTLVKQLSSNFGAISSVLNDILSRLDPPEAEVQ |
| | IDRLITGRLQSLQTYVTQQLIRAAEIRASANLAATKMSECVLG |
| | QSKRVDFCGKGYHLMSFPQSAPHGVVFLHVTYVPAQEKNFTT |
| | APAICHDGKAHFPREGVFVSNGTHWFVTQRNFYEPQIITTDNT |
| | FVSGNCDVVIGIVNNTVYDPLQPELDSFKEELDKYFKNHTSPD |
| | VDLGDISGINASVVNIQKEIDRLNEVAKNLNESLIDLQELGKYE |
| | Q |
| Optimized nucleotide | (SEQ ID NO: 46) |
| sequence encoding the | ATGTTCGTCTTCCTCGTGCTGCTCCCACTCGTTTCTTCCCAG |
| ectodomain of the | TGTGTCAACCTGACAACTAGGACTCAGCTGCCACCAGCCTA |
| SARS-CoV-2 S protein | CACCAACTCCTTCACCAGAGGCGTGTATTACCCAGACAAGG |
| with a Foldon | TGTTTAGAAGCAGCGTGCTGCACTCTACCCAGGACCTCTTT |
| | CTGCCCTTTTTCAGCAACGTGACATGGTTTCACGCAATTCA |
| | CGTGTCCGGCACTAATGGCACAAAGCGGTTCGACAATCCA |
| | GTCCTGCCTTTCAACGATGGCGTCTACTTTGCATCTACTGA |
| | GAAATCCAATATCATTAGGGGATGGATCTTCGGCACAACCC |
| | TGGATTCTAAGACCCAGAGCCTGCTGATCGTCAACAACGCC |
| | ACAAACGTGGTCATTAAGGTTTGCGAGTTTCAGTTCTGTAA |
| | CGATCCTTTTCTGGGCGTGTATTATCATAAGAACAATAAGA |
| | GCTGGATGGAGTCCGAGTTTAGAGTGTATAGCTCTGCAAAT |
| | AATTGTACCTTTGAGTACGTGAGCCAGCCCTTTCTGATGGA |
| | CCTGGAGGGAAAACAAGGAAACTTCAAAAACCTGCGGGAA |
| | TTCGTTTTCAAAAACATCGACGGCTATTTCAAGATCTATAG |
| | CAAGCATACCCCAATCAACCTCGTGAGGGACCTCCCCCAG |
| | GGCTTTAGCGCACTGGAGCCACTGGTTGACCTGCCTATCGG |
| | CATTAATATCACAAGATTTCAGACCCTGCTGGCACTGCATA |
| | GAAGCTATCTGACCCCTGGAGACTCCTCTAGTGGGTGGACT |
| | GCCGGCGCCGCTGCCTACTATGTGGGCTATCTGCAGCCACG |
| | GACATTCCTGCTGAAATACAATGAGAACGGGACAATCACA |
| | GATGCTGTTGATTGCGCACTCGACCCCCTGTCCGAGACAAA |
| | GTGCACTCTCAAGAGCTTTACCGTCGAGAAGGGCATCTATC |
| | AGACCTCAAACTTCAGGGTGCAGCCCACAGAATCTATCGTG |
| | CGCTTCCCTAATATCACTAACCTGTGTCCTTTCGGTGAAGT |
| | GTTCAACGCCACCAGGTTTGCTAGCGTGTATGCCTGGAACA |
| | GGAAGAGGATCTCTAACTGCGTCGCCGACTATTCCGTGCTG |
| | TATAACAGCGCCTCCTTCTCCACATTCAAATGCTATGGAGT |
| | GAGCCCGACAAAACTGAACGATCTCTGCTTTACAAATGTCT |
| | ACGCCGACTCTTTTGTGATCAGAGGGGACGAGGTCCGGCA |
| | GATCGCACCAGGACAGACAGGCAAGATTGCTGACTACAAC |
| | TATAAGCTGCCTGACGACTTCACAGGATGTGTGATCGCATG |
| | GAACTCAAACAATCTGGACTCCAAAGTCGGGGGCAACTAT |
| | AATTACCTGTATCGCCTGTTCCGGAAGTCCAACCTGAAGCC |
| | CTTCGAGAGGGACATCAGTACAGAGATCTATCAGGCTGGC |
| | TCCACCCCTTGCAATGGCGTCGAAGGCTTTAATTGTTATTTT |
| | CCCCTGCAGTCTTACGGGTTTCAGCCTACTAATGGAGTTGG |
| | GTACCAGCCATACAGAGTGGTCGTGCTCAGCTTCGAGCTCC |
| | TGCATGCTCCAGCTACAGTTTGCGGGCCAAAGAAGTCCACT |
| | AACCTGGTGAAGAATAAGTGCGTCAACTTCAACTTTAACGG |
| | GCTCACCGGCACCGGCGTGCTGACTGAGAGCAACAAGAAG |
| | TTTCTGCCATTTCAACAGTTTGGACGGGACATTGCCGACAC |
| | CACCGATGCCGTTCGGGATCCACAGACCCTGGAAATTCTGG |
| | ACATTACACCGTGCAGCTTCGGGGGCGTGAGCGTGATCAC |
| | ACCCGGAACCAATACAAGCAACCAGGTTGCCGTCCTGTATC |
| | AGGATGTCAATTGCACAGAAGTGCCAGTTGCTATCCACGCA |
| | GACCAGCTGACTCCCACATGGCGGGTGTATAGCACCGGAT |
| | CCAACGTGTTTCAGACCCGCGCCGGATGTCTCATTGGGGCC |
| | GAGCACGTGAATAACAGCTACGAGTGCGACATCCCCATTG |
| | GCGCCGGCATTTGTGCGTCTTACCAGACTCAGACCAACTCT |
| | CCTAGAAGGGCCAGGTCCGTTGCTAGTCAGTCTATTATTGC |
| | CTATACCATGAGCCTCGGAGCTGAGAATAGCGTGGCCTACT |
| | CCAATAATTCCATCGCAATCCCTACTAACTTCACTATTTCTG |
| | TGACCACCGAGATCCTGCCTGTGTCTATGACTAAGACTAGC |
| | GTTGATTGTACCATGTATATTTGTGGCGACTCTACCGAATG |
| | TTCTAACCTGCTGCTTCAGTACGGCTCATTTTGCACACAGCT |
| | GAACAGAGCCCTGACTGGGATCGCTGTGGAGCAGGACAAG |
| | AACACACAGGAGGTGTTTGCACAGGTGAAGCAGATCTATA |
| | AGACCCCTCCTATTAAGGATTTCGGCGGATTCAATTTCTCA |
| | CAGATTCTGCCAGACCCCAGTAAGCCTTCCAAGAGGAGCTT |
| | CATCGAGGATCTCCTGTTTAACAAGGTGACCCTGGCAGACG |
| | CCGGCTTTATTAAGCAATATGGGGATTGCCTGGGCGACATT |
| | GCTGCCAGAGACCTGATTTGCGCCCAGAAATTCAATGGCCT |
| | CACAGTGCTGCCACCTCTGCTGACCGACGAGATGATCGCTC |
| | AATACACTAGCGCACTGCTGGCCGGAACCATCACATCAGG |
| | CTGGACCTTCGGGGCCGGAGCAGCACTGCAGATTCCATTCG |
| | CCATGCAGATGGCCTATAGATTCAACGGCATTGGCGTCACA |
| | CAGAACGTGCTGTACGAAAACCAGAAGCTCATCGCTAACC |
| | AGTTTAATTCCGCAATTGGAAAGATCCAAGATTCACTCAGC |
| | TCAACCGCCTCTGCACTCGGAAAGCTGCAGGACGTGGTCA |
| | ACCAGAATGCTCAGGCCCTGAACACACTCGTCAAGCAGCT |
| | GTCCTCTAACTTTGGCGCTATCAGCTCCGTTCTGAACGACA |
| | TTCTGAGCCGCCTGGATAAGGTGGAGGCTGAAGTCCAGATT |
| | GACCGCCTGATTACCGGCCGGCTGCAGTCTCTGCAAACATA |
| | CGTGACCCAGCAGCTGATCAGAGCAGCCGAGATCCGGGCA |
| | TCCGCAAATCTGGCAGCAACTAAGATGAGCGAATGCGTGC |
| | TGGGCCAGTCCAAGCGGGTGGACTTTTGTGGCAAGGGCTA |
| | CCACCTGATGAGCTTCCCCCAGAGCGCCCCACATGGCGTTG |
| | TTTTTCTGCACGTGACCTATGTCCCTGCTCAGGAAAAGAAC |
| | TTTACAACTGCTCCTGCTATCTGCCATGACGGCAAGGCCCA |
| | CTTCCCACGGGAGGGAGTGTTTGTGTCCAATGGCACACACT |
| | GGTTCGTGACCCAGAGGAACTTCTATGAACCCCAGATCATC |
| | ACCACTGACAATACCTTCGTGTCTGGAAATTGCGACGTCGT |
| | GATCGGCATCGTTAACAACACCGTGTACGACCCTCTCCAGC |
| | CAGAGCTGGACTCCTTTAAGGAGGAACTGGATAAGTATTTT |
| | AAGAACCACACAAGCCCAGATGTGGATCTCGGGGACATCT |
| | CCGGAATTAACGCCTCCGTGGTGAATATCCAGAAGGAGAT |
| | TGACCGCCTAAATGAAGTTGCCAAGAACCTCAATGAGTCTC |
| | TGATTGATCTGCAGGAACTGGGCAAGTATGAGCAGGGGTA |
| | CATTCCCGAGGCTCCTAGGGACGGCCAGGCATACGTGCGC |
| | AAAGACGGCGAGTGGGTGCTGCTGTCCACATTCCTGTAA |
| Ectodomain of a SARS- | (SEQ ID NO: 14) |
| CoV-2 S protein with a | MFVFLVLLPLVSSQCVNLTTRTQLPPAYTNSFTRGVYYPDKVF |
| Foldon | RSSVLHSTQDLFLPFFSNVTWFHAIHVSGTNGTKRFDNPVLPF |
| | NDGVYFASTEKSNIIRGWIFGTTLDSKTQSLLIVNNATNVVIKV |
| | CEFQFCNDPFLGVYYHKNNKSWMESEFRVYSSANNCTFEYVS |
| | QPFLMDLEGKQGNFKNLREFVFKNIDGYFKIYSKHTPINLVRD |
| | LPQGFSALEPLVDLPIGINITRFQTLLALHRSYLTPGDSSSGWT |
| | AGAAAYYVGYLQPRTFLLKYNENGTITDAVDCALDPLSETKC |
| | TLKSFTVEKGIYQTSNFRVQPTESIVRFPNITNLCPFGEVFNATR |
| | FASVYAWNRKRISNCVADYSVLYNSASFSTFKCYGVSPTKLN |
| | DLCFTNVYADSFVIRGDEVRQIAPGQTGKIADYNYKLPDDFTG |
| | CVIAWNSNNLDSKVGGNYNYLYRLFRKSNLKPFERDISTEIYQ |
| | AGSTPCNGVEGFNCYFPLQSYGFQPTNGVGYQPYRVVVLSFE |
| | LLHAPATVCGPKKSTNLVKNKCVNFNFNGLTGTGVLTESNKK |
| | FLPFQQFGRDIADTTDAVRDPQTLEILDITPCSFGGVSVITPGTN |
| | TSNQVAVLYQDVNCTEVPVAIHADQLTPTWRVYSTGSNVFQT |
| | RAGCLIGAEHVNNSYECDIPIGAGICASYQTQTNSPRRARSVA |
| | SQSIIAYTMSLGAENSVAYSNNSIAIPTNFTISVTTEILPVSMTK |
| | TSVDCTMYICGDSTECSNLLLQYGSFCTQLNRALTGIAVEQDK |
| | NTQEVFAQVKQIYKTPPIKDFGGFNFSQILPDPSKPSKRSFIEDL |
| | LFNKVTLADAGFIKQYGDCLGDIAARDLICAQKFNGLTVLPPL |
| | LTDEMIAQYTSALLAGTITSGWTFGAGAALQIPFAMQMAYRF |
| | NGIGVTQNVLYENQKLIANQFNSAIGKIQDSLSSTASALGKLQ |
| | DVVNQNAQALNTLVKQLSSNFGAISSVLNDILSRLDKVEAEV |
| | QIDRLITGRLQSLQTYVTQQLIRAAEIRASANLAATKMSECVL |
| | GQSKRVDFCGKGYHLMSFPQSAPHGVVFLHVTYVPAQEKNF |
| | TTAPAICHDGKAHFPREGVFVSNGTHWFVTQRNFYEPQIITTD |
| | NTFVSGNCDVVIGIVNNTVYDPLQPELDSFKEELDKYFKNHTS |
| | PDVDLGDISGINASVVNIQKEIDRLNEVAKNLNESLIDLQELGK |
| | YEQGYIPEAPRDGQAYVRKDGEWVLLSTFL |
| Optimized nucleotide | (SEQ ID NO: 47) |
| sequence encoding the | ATGTTCGTCTTCCTCGTGCTGCTCCCACTCGTTTCTTCCCAG |
| S2′ subunit of a SARS- | TGTAGCTTCATCGAGGATCTCCTGTTTAACAAGGTGACCCT |
| CoV-2 S protein with a | GGCAGACGCCGGCTTTATTAAGCAATATGGGGATTGCCTGG |
| Foldon and a signal | GCGACATTGCTGCCAGAGACCTGATTTGCGCCCAGAAATTC |
| sequence | AATGGCCTCACAGTGCTGCCACCTCTGCTGACCGACGAGAT |
| | GATCGCTCAATACACTAGCGCACTGCTGGCCGGAACCATCA |
| | CATCAGGCTGGACCTTCGGGGCCGGAGCAGCACTGCAGAT |
| | TCCATTCGCCATGCAGATGGCCTATAGATTCAACGGCATTG |
| | GCGTCACACAGAACGTGCTGTACGAAAACCAGAAGCTCAT |
| | CGCTAACCAGTTTAATTCCGCAATTGGAAAGATCCAAGATT |
| | CACTCAGCTCAACCGCCTCTGCACTCGGAAAGCTGCAGGAC |
| | GTGGTCAACCAGAATGCTCAGGCCCTGAACACACTCGTCA |
| | AGCAGCTGTCCTCTAACTTTGGCGCTATCAGCTCCGTTCTG |
| | AACGACATTCTGAGCCGCCTGGATAAGGTGGAGGCTGAAG |
| | TCCAGATTGACCGCCTGATTACCGGCCGGCTGCAGTCTCTG |
| | CAAACATACGTGACCCAGCAGCTGATCAGAGCAGCCGAGA |
| | TCCGGGCATCCGCAAATCTGGCAGCAACTAAGATGAGCGA |
| | ATGCGTGCTGGGCCAGTCCAAGCGGGTGGACTTTTGTGGCA |
| | AGGGCTACCACCTGATGAGCTTCCCCCAGAGCGCCCCACAT |
| | GGCGTTGTTTTTCTGCACGTGACCTATGTCCCTGCTCAGGA |
| | AAAGAACTTTACAACTGCTCCTGCTATCTGCCATGACGGCA |
| | AGGCCCACTTCCCACGGGAGGGAGTGTTTGTGTCCAATGGC |
| | ACACACTGGTTCGTGACCCAGAGGAACTTCTATGAACCCCA |
| | GATCATCACCACTGACAATACCTTCGTGTCTGGAAATTGCG |
| | ACGTCGTGATCGGCATCGTTAACAACACCGTGTACGACCCT |
| | CTCCAGCCAGAGCTGGACTCCTTTAAGGAGGAACTGGATA |
| | AGTATTTTAAGAACCACACAAGCCCAGATGTGGATCTCGG |
| | GGACATCTCCGGAATTAACGCCTCCGTGGTGAATATCCAGA |
| | AGGAGATTGACCGCCTAAATGAAGTTGCCAAGAACCTCAA |
| | TGAGTCTCTGATTGATCTGCAGGAACTGGGCAAGTATGAGC |
| | AGGGGTACATTCCCGAGGCTCCTAGGGACGGCCAGGCATA |
| | CGTGCGCAAAGACGGCGAGTGGGTGCTGCTGTCCACATTCC |
| | TGTAA |
| S2′ subunit of a SARS- | (SEQ ID NO: 15) |
| CoV-2 S protein with a | MFVFLVLLPLVSSQCSFIEDLLFNKVTLADAGFIKQYGDCLGDI |
| Foldon and a signal | AARDLICAQKFNGLTVLPPLLTDEMIAQYTSALLAGTITSGWT |
| sequence | FGAGAALQIPFAMQMAYRFNGIGVTQNVLYENQKLIANQFNS |
| | AIGKIQDSLSSTASALGKLQDVVNQNAQALNTLVKQLSSNFG |
| | AISSVLNDILSRLDKVEAEVQIDRLITGRLQSLQTYVTQQLIRA |
| | AEIRASANLAATKMSECVLGQSKRVDFCGKGYHLMSFPQSAP |
| | HGVVFLHVTYVPAQEKNFTTAPAICHDGKAHFPREGVFVSNG |
| | THWFVTQRNFYEPQIITTDNTFVSGNCDVVIGIVNNTVYDPLQ |
| | PELDSFKEELDKYFKNHTSPDVDLGDISGINASVVNIQKEIDRL |
| | NEVAKNLNESLIDLQELGKYEQGYIPEAPRDGQAYVRKDGEWV |
| | LLSTFL |
| Optimized nucleotide | (SEQ ID NO: 48) |
| sequence encoding the | ATGTTCGTCTTCCTCGTGCTGCTCCCACTCGTTTCTTCCCAG |
| ectodomain of a SARS- | TGTGTCAACCTGACAACTAGGACTCAGCTGCCACCAGCCTA |
| CoV-2 S protein, which | CACCAACTCCTTCACCAGAGGCGTGTATTACCCAGACAAGG |
| has been modified by | TGTTTAGAAGCAGCGTGCTGCACTCTACCCAGGACCTCTTT |
| mutating residues 986 | CTGCCCTTTTTCAGCAACGTGACATGGTTTCACGCAATTCA |
| and 987 to proline, with | CGTGTCCGGCACTAATGGCACAAAGCGGTTCGACAATCCA |
| a Foldon | GTCCTGCCTTTCAACGATGGCGTCTACTTTGCATCTACTGA |
| | GAAATCCAATATCATTAGGGGATGGATCTTCGGCACAACCC |
| | TGGATTCTAAGACCCAGAGCCTGCTGATCGTCAACAACGCC |
| | ACAAACGTGGTCATTAAGGTTTGCGAGTTTCAGTTCTGTAA |
| | CGATCCTTTTCTGGGCGTGTATTATCATAAGAACAATAAGA |
| | GCTGGATGGAGTCCGAGTTTAGAGTGTATAGCTCTGCAAAT |
| | AATTGTACCTTTGAGTACGTGAGCCAGCCCTTTCTGATGGA |
| | CCTGGAGGGAAAACAAGGAAACTTCAAAAACCTGCGGGAA |
| | TTCGTTTTCAAAAACATCGACGGCTATTTCAAGATCTATAG |
| | CAAGCATACCCCAATCAACCTCGTGAGGGACCTCCCCCAG |
| | GGCTTTAGCGCACTGGAGCCACTGGTTGACCTGCCTATCGG |
| | CATTAATATCACAAGATTTCAGACCCTGCTGGCACTGCATA |
| | GAAGCTATCTGACCCCTGGAGACTCCTCTAGTGGGTGGACT |
| | GCCGGCGCCGCTGCCTACTATGTGGGCTATCTGCAGCCACG |
| | GACATTCCTGCTGAAATACAATGAGAACGGGACAATCACA |
| | GATGCTGTTGATTGCGCACTCGACCCCCTGTCCGAGACAAA |
| | GTGCACTCTCAAGAGCTTTACCGTCGAGAAGGGCATCTATC |
| | AGACCTCAAACTTCAGGGTGCAGCCCACAGAATCTATCGTG |
| | CGCTTCCCTAATATCACTAACCTGTGTCCTTTCGGTGAAGT |
| | GTTCAACGCCACCAGGTTTGCTAGCGTGTATGCCTGGAACA |
| | GGAAGAGGATCTCTAACTGCGTCGCCGACTATTCCGTGCTG |
| | TATAACAGCGCCTCCTTCTCCACATTCAAATGCTATGGAGT |
| | GAGCCCGACAAAACTGAACGATCTCTGCTTTACAAATGTCT |
| | ACGCCGACTCTTTTGTGATCAGAGGGGACGAGGTCCGGCA |
| | GATCGCACCAGGACAGACAGGCAAGATTGCTGACTACAAC |
| | TATAAGCTGCCTGACGACTTCACAGGATGTGTGATCGCATG |
| | GAACTCAAACAATCTGGACTCCAAAGTCGGGGGCAACTAT |
| | AATTACCTGTATCGCCTGTTCCGGAAGTCCAACCTGAAGCC |
| | CTTCGAGAGGGACATCAGTACAGAGATCTATCAGGCTGGC |
| | TCCACCCCTTGCAATGGCGTCGAAGGCTTTAATTGTTATTTT |
| | CCCCTGCAGTCTTACGGGTTTCAGCCTACTAATGGAGTTGG |
| | GTACCAGCCATACAGAGTGGTCGTGCTCAGCTTCGAGCTCC |
| | TGCATGCTCCAGCTACAGTTTGCGGGCCAAAGAAGTCCACT |
| | AACCTGGTGAAGAATAAGTGCGTCAACTTCAACTTTAACGG |
| | GCTCACCGGCACCGGCGTGCTGACTGAGAGCAACAAGAAG |
| | TTTCTGCCATTTCAACAGTTTGGACGGGACATTGCCGACAC |
| | CACCGATGCCGTTCGGGATCCACAGACCCTGGAAATTCTGG |
| | ACATTACACCGTGCAGCTTCGGGGGCGTGAGCGTGATCAC |
| | ACCCGGAACCAATACAAGCAACCAGGTTGCCGTCCTGTATC |
| | AGGATGTCAATTGCACAGAAGTGCCAGTTGCTATCCACGCA |
| | GACCAGCTGACTCCCACATGGCGGGTGTATAGCACCGGAT |
| | CCAACGTGTTTCAGACCCGCGCCGGATGTCTCATTGGGGCC |
| | GAGCACGTGAATAACAGCTACGAGTGCGACATCCCCATTG |
| | GCGCCGGCATTTGTGCGTCTTACCAGACTCAGACCAACTCT |
| | CCTAGAAGGGCCAGGTCCGTTGCTAGTCAGTCTATTATTGC |
| | CTATACCATGAGCCTCGGAGCTGAGAATAGCGTGGCCTACT |
| | CCAATAATTCCATCGCAATCCCTACTAACTTCACTATTTCTG |
| | TGACCACCGAGATCCTGCCTGTGTCTATGACTAAGACTAGC |
| | GTTGATTGTACCATGTATATTTGTGGCGACTCTACCGAATG |
| | TTCTAACCTGCTGCTTCAGTACGGCTCATTTTGCACACAGCT |
| | GAACAGAGCCCTGACTGGGATCGCTGTGGAGCAGGACAAG |
| | AACACACAGGAGGTGTTTGCACAGGTGAAGCAGATCTATA |
| | AGACCCCTCCTATTAAGGATTTCGGCGGATTCAATTTCTCA |
| | CAGATTCTGCCAGACCCCAGTAAGCCTTCCAAGAGGAGCTT |
| | CATCGAGGATCTCCTGTTTAACAAGGTGACCCTGGCAGACG |
| | CCGGCTTTATTAAGCAATATGGGGATTGCCTGGGCGACATT |
| | GCTGCCAGAGACCTGATTTGCGCCCAGAAATTCAATGGCCT |
| | CACAGTGCTGCCACCTCTGCTGACCGACGAGATGATCGCTC |
| | AATACACTAGCGCACTGCTGGCCGGAACCATCACATCAGG |
| | CTGGACCTTCGGGGCCGGAGCAGCACTGCAGATTCCATTCG |
| | CCATGCAGATGGCCTATAGATTCAACGGCATTGGCGTCACA |
| | CAGAACGTGCTGTACGAAAACCAGAAGCTCATCGCTAACC |
| | AGTTTAATTCCGCAATTGGAAAGATCCAAGATTCACTCAGC |
| | TCAACCGCCTCTGCACTCGGAAAGCTGCAGGACGTGGTCA |
| | ACCAGAATGCTCAGGCCCTGAACACACTCGTCAAGCAGCT |
| | GTCCTCTAACTTTGGCGCTATCAGCTCCGTTCTGAACGACA |
| | TTCTGAGCCGCCTGGATCCCCCAGAGGCTGAAGTCCAGATT |
| | GACCGCCTGATTACCGGCCGGCTGCAGTCTCTGCAAACATA |
| | CGTGACCCAGCAGCTGATCAGAGCAGCCGAGATCCGGGCA |
| | TCCGCAAATCTGGCAGCAACTAAGATGAGCGAATGCGTGC |
| | TGGGCCAGTCCAAGCGGGTGGACTTTTGTGGCAAGGGCTA |
| | CCACCTGATGAGCTTCCCCCAGAGCGCCCCACATGGCGTTG |
| | TTTTTCTGCACGTGACCTATGTCCCTGCTCAGGAAAAGAAC |
| | TTTACAACTGCTCCTGCTATCTGCCATGACGGCAAGGCCCA |
| | CTTCCCACGGGAGGGAGTGTTTGTGTCCAATGGCACACACT |
| | GGTTCGTGACCCAGAGGAACTTCTATGAACCCCAGATCATC |
| | ACCACTGACAATACCTTCGTGTCTGGAAATTGCGACGTCGT |
| | GATCGGCATCGTTAACAACACCGTGTACGACCCTCTCCAGC |
| | CAGAGCTGGACTCCTTTAAGGAGGAACTGGATAAGTATTTT |
| | AAGAACCACACAAGCCCAGATGTGGATCTCGGGGACATCT |
| | CCGGAATTAACGCCTCCGTGGTGAATATCCAGAAGGAGAT |
| | TGACCGCCTAAATGAAGTTGCCAAGAACCTCAATGAGTCTC |
| | TGATTGATCTGCAGGAACTGGGCAAGTATGAGCAGGGGTA |
| | CATTCCCGAGGCTCCTAGGGACGGCCAGGCATACGTGCGC |
| | AAAGACGGCGAGTGGGTGCTGCTGTCCACATTCCTGTAA |
| Ectodomain of a SARS- | (SEQ ID NO: 16) |
| CoV-2 S protein, which | MFVFLVLLPLVSSQCVNLTTRTQLPPAYTNSFTRGVYYPDKVF |
| has been modified by | RSSVLHSTQDLFLPFFSNVTWFHAIHVSGTNGTKRFDNPVLPF |
| mutating residues 986 | NDGVYFASTEKSNIIRGWIFGTTLDSKTQSLLIVNNATNVVIKV |
| and 987 to proline, with | CEFQFCNDPFLGVYYHKNNKSWMESEFRVYSSANNCTFEYVS |
| a Foldon | QPFLMDLEGKQGNFKNLREFVFKNIDGYFKIYSKHTPINLVRD |
| | LPQGFSALEPLVDLPIGINITRFQTLLALHRSYLTPGDSSSGWT |
| | AGAAAYYVGYLQPRTFLLKYNENGTITDAVDCALDPLSETKC |
| | TLKSFTVEKGIYQTSNFRVQPTESIVRFPNITNLCPFGEVFNATR |
| | FASVYAWNRKRISNCVADYSVLYNSASFSTFKCYGVSPTKLN |
| | DLCFTNVYADSFVIRGDEVRQIAPGQTGKIADYNYKLPDDFTG |
| | CVIAWNSNNLDSKVGGNYNYLYRLFRKSNLKPFERDISTEIYQ |
| | AGSTPCNGVEGENCYFPLQSYGFQPTNGVGYQPYRVVVLSFE |
| | LLHAPATVCGPKKSTNLVKNKCVNFNFNGLTGTGVLTESNKK |
| | FLPFQQFGRDIADTTDAVRDPQTLEILDITPCSFGGVSVITPGTN |
| | TSNQVAVLYQDVNCTEVPVAIHADQLTPTWRVYSTGSNVFQT |
| | RAGCLIGAEHVNNSYECDIPIGAGICASYQTQTNSPRRARSVA |
| | SQSIIAYTMSLGAENSVAYSNNSIAIPTNFTISVTTEILPVSMTK |
| | TSVDCTMYICGDSTECSNLLLQYGSFCTQLNRALTGIAVEQDK |
| | NTQEVFAQVKQIYKTPPIKDFGGFNFSQILPDPSKPSKRSFIEDL |
| | LFNKVTLADAGFIKQYGDCLGDIAARDLICAQKFNGLTVLPPL |
| | LTDEMIAQYTSALLAGTITSGWTFGAGAALQIPFAMQMAYRF |
| | NGIGVTQNVLYENQKLIANQFNSAIGKIQDSLSSTASALGKLQ |
| | DVVNQNAQALNTLVKQLSSNFGAISSVLNDILSRLDPPEAEVQ |
| | IDRLITGRLQSLQTYVTQQLIRAAEIRASANLAATKMSECVLG |
| | QSKRVDFCGKGYHLMSFPQSAPHGVVFLHVTYVPAQEKNFTT |
| | APAICHDGKAHFPREGVFVSNGTHWFVTQRNFYEPQIITTDNT |
| | FVSGNCDVVIGIVNNTVYDPLQPELDSFKEELDKYFKNHTSPD |
| | VDLGDISGINASVVNIQKEIDRLNEVAKNLNESLIDLQELGKYE |
| | QGYIPEAPRDGQAYVRKDGEWVLLSTFL |
| Optimized nucleotide | (SEQ ID NO: 49) |
| sequence encoding the | ATGTTCGTCTTCCTCGTGCTGCTCCCACTCGTTTCTTCCCAG |
| ectodomain of a SARS- | TGTGTCAACCTGACAACTAGGACTCAGCTGCCACCAGCCTA |
| CoV-2 S protein, which | CACCAACTCCTTCACCAGAGGCGTGTATTACCCAGACAAGG |
| has been modified to | TGTTTAGAAGCAGCGTGCTGCACTCTACCCAGGACCTCTTT |
| remove the furin | CTGCCCTTTTTCAGCAACGTGACATGGTTTCACGCAATTCA |
| cleavage site and to | CGTGTCCGGCACTAATGGCACAAAGCGGTTCGACAATCCA |
| replace residues 986 and | GTCCTGCCTTTCAACGATGGCGTCTACTTTGCATCTACTGA |
| 987 with proline, with a | GAAATCCAATATCATTAGGGGATGGATCTTCGGCACAACCC |
| C terminal Foldon | TGGATTCTAAGACCCAGAGCCTGCTGATCGTCAACAACGCC |
| | ACAAACGTGGTCATTAAGGTTTGCGAGTTTCAGTTCTGTAA |
| | CGATCCTTTTCTGGGCGTGTATTATCATAAGAACAATAAGA |
| | GCTGGATGGAGTCCGAGTTTAGAGTGTATAGCTCTGCAAAT |
| | AATTGTACCTTTGAGTACGTGAGCCAGCCCTTTCTGATGGA |
| | CCTGGAGGGAAAACAAGGAAACTTCAAAAACCTGCGGGAA |
| | TTCGTTTTCAAAAACATCGACGGCTATTTCAAGATCTATAG |
| | CAAGCATACCCCAATCAACCTCGTGAGGGACCTCCCCCAG |
| | GGCTTTAGCGCACTGGAGCCACTGGTTGACCTGCCTATCGG |
| | CATTAATATCACAAGATTTCAGACCCTGCTGGCACTGCATA |
| | GAAGCTATCTGACCCCTGGAGACTCCTCTAGTGGGTGGACT |
| | GCCGGCGCCGCTGCCTACTATGTGGGCTATCTGCAGCCACG |
| | GACATTCCTGCTGAAATACAATGAGAACGGGACAATCACA |
| | GATGCTGTTGATTGCGCACTCGACCCCCTGTCCGAGACAAA |
| | GTGCACTCTCAAGAGCTTTACCGTCGAGAAGGGCATCTATC |
| | AGACCTCAAACTTCAGGGTGCAGCCCACAGAATCTATCGTG |
| | CGCTTCCCTAATATCACTAACCTGTGTCCTTTCGGTGAAGT |
| | GTTCAACGCCACCAGGTTTGCTAGCGTGTATGCCTGGAACA |
| | GGAAGAGGATCTCTAACTGCGTCGCCGACTATTCCGTGCTG |
| | TATAACAGCGCCTCCTTCTCCACATTCAAATGCTATGGAGT |
| | GAGCCCGACAAAACTGAACGATCTCTGCTTTACAAATGTCT |
| | ACGCCGACTCTTTTGTGATCAGAGGGGACGAGGTCCGGCA |
| | GATCGCACCAGGACAGACAGGCAAGATTGCTGACTACAAC |
| | TATAAGCTGCCTGACGACTTCACAGGATGTGTGATCGCATG |
| | GAACTCAAACAATCTGGACTCCAAAGTCGGGGGCAACTAT |
| | AATTACCTGTATCGCCTGTTCCGGAAGTCCAACCTGAAGCC |
| | CTTCGAGAGGGACATCAGTACAGAGATCTATCAGGCTGGC |
| | TCCACCCCTTGCAATGGCGTCGAAGGCTTTAATTGTTATTTT |
| | CCCCTGCAGTCTTACGGGTTTCAGCCTACTAATGGAGTTGG |
| | GTACCAGCCATACAGAGTGGTCGTGCTCAGCTTCGAGCTCC |
| | TGCATGCTCCAGCTACAGTTTGCGGGCCAAAGAAGTCCACT |
| | AACCTGGTGAAGAATAAGTGCGTCAACTTCAACTTTAACGG |
| | GCTCACCGGCACCGGCGTGCTGACTGAGAGCAACAAGAAG |
| | TTTCTGCCATTTCAACAGTTTGGACGGGACATTGCCGACAC |
| | CACCGATGCCGTTCGGGATCCACAGACCCTGGAAATTCTGG |
| | ACATTACACCGTGCAGCTTCGGGGGCGTGAGCGTGATCAC |
| | ACCCGGAACCAATACAAGCAACCAGGTTGCCGTCCTGTATC |
| | AGGATGTCAATTGCACAGAAGTGCCAGTTGCTATCCACGCA |
| | GACCAGCTGACTCCCACATGGCGGGTGTATAGCACCGGAT |
| | CCAACGTGTTTCAGACCCGCGCCGGATGTCTCATTGGGGCC |
| | GAGCACGTGAATAACAGCTACGAGTGCGACATCCCCATTG |
| | GCGCCGGCATTTGTGCGTCTTACCAGACTCAGACCAACTCT |
| | CCTGGCTCCGCCTCTTCCGTTGCTAGTCAGTCTATTATTGCC |
| | TATACCATGAGCCTCGGAGCTGAGAATAGCGTGGCCTACTC |
| | CAATAATTCCATCGCAATCCCTACTAACTTCACTATTTCTGT |
| | GACCACCGAGATCCTGCCTGTGTCTATGACTAAGACTAGCG |
| | TTGATTGTACCATGTATATTTGTGGCGACTCTACCGAATGTT |
| | CTAACCTGCTGCTTCAGTACGGCTCATTTTGCACACAGCTG |
| | AACAGAGCCCTGACTGGGATCGCTGTGGAGCAGGACAAGA |
| | ACACACAGGAGGTGTTTGCACAGGTGAAGCAGATCTATAA |
| | GACCCCTCCTATTAAGGATTTCGGCGGATTCAATTTCTCAC |
| | AGATTCTGCCAGACCCCAGTAAGCCTTCCAAGAGGAGCTTC |
| | ATCGAGGATCTCCTGTTTAACAAGGTGACCCTGGCAGACGC |
| | CGGCTTTATTAAGCAATATGGGGATTGCCTGGGCGACATTG |
| | CTGCCAGAGACCTGATTTGCGCCCAGAAATTCAATGGCCTC |
| | ACAGTGCTGCCACCTCTGCTGACCGACGAGATGATCGCTCA |
| | ATACACTAGCGCACTGCTGGCCGGAACCATCACATCAGGCT |
| | GGACCTTCGGGGCCGGAGCAGCACTGCAGATTCCATTCGCC |
| | ATGCAGATGGCCTATAGATTCAACGGCATTGGCGTCACACA |
| | GAACGTGCTGTACGAAAACCAGAAGCTCATCGCTAACCAG |
| | TTTAATTCCGCAATTGGAAAGATCCAAGATTCACTCAGCTC |
| | AACCGCCTCTGCACTCGGAAAGCTGCAGGACGTGGTCAAC |
| | CAGAATGCTCAGGCCCTGAACACACTCGTCAAGCAGCTGTC |
| | CTCTAACTTTGGCGCTATCAGCTCCGTTCTGAACGACATTCT |
| | GAGCCGCCTGGATCCCCCAGAGGCTGAAGTCCAGATTGAC |
| | CGCCTGATTACCGGCCGGCTGCAGTCTCTGCAAACATACGT |
| | GACCCAGCAGCTGATCAGAGCAGCCGAGATCCGGGCATCC |
| | GCAAATCTGGCAGCAACTAAGATGAGCGAATGCGTGCTGG |
| | GCCAGTCCAAGCGGGTGGACTTTTGTGGCAAGGGCTACCA |
| | CCTGATGAGCTTCCCCCAGAGCGCCCCACATGGCGTTGTTT |
| | TTCTGCACGTGACCTATGTCCCTGCTCAGGAAAAGAACTTT |
| | ACAACTGCTCCTGCTATCTGCCATGACGGCAAGGCCCACTT |
| | CCCACGGGAGGGAGTGTTTGTGTCCAATGGCACACACTGGT |
| | TCGTGACCCAGAGGAACTTCTATGAACCCCAGATCATCACC |
| | ACTGACAATACCTTCGTGTCTGGAAATTGCGACGTCGTGAT |
| | CGGCATCGTTAACAACACCGTGTACGACCCTCTCCAGCCAG |
| | AGCTGGACTCCTTTAAGGAGGAACTGGATAAGTATTTTAAG |
| | AACCACACAAGCCCAGATGTGGATCTCGGGGACATCTCCG |
| | GAATTAACGCCTCCGTGGTGAATATCCAGAAGGAGATTGA |
| | CCGCCTAAATGAAGTTGCCAAGAACCTCAATGAGTCTCTGA |
| | TTGATCTGCAGGAACTGGGCAAGTATGAGCAGGGGTACAT |
| | TCCCGAGGCTCCTAGGGACGGCCAGGCATACGTGCGCAAA |
| | GACGGCGAGTGGGTGCTGCTGTCCACATTCCTGTAA |
| Ectodomain of a SARS- | (SEQ ID NO: 17) |
| CoV-2 S protein, which | MFVFLVLLPLVSSQCVNLTTRTQLPPAYTNSFTRGVYYPDKVF |
| has been modified to | RSSVLHSTQDLFLPFFSNVTWFHAIHVSGTNGTKRFDNPVLPF |
| remove a furin cleavage | NDGVYFASTEKSNIIRGWIFGTTLDSKTQSLLIVNNATNVVIKV |
| site and to replace | CEFQFCNDPFLGVYYHKNNKSWMESEFRVYSSANNCTFEYVS |
| residues 986 and 987 | QPFLMDLEGKQGNFKNLREFVFKNIDGYFKIYSKHTPINLVRD |
| with proline, with a C | LPQGFSALEPLVDLPIGINITRFQTLLALHRSYLTPGDSSSGWT |
| terminal Foldon | AGAAAYYVGYLQPRTFLLKYNENGTITDAVDCALDPLSETKC |
| | TLKSFTVEKGIYQTSNFRVQPTESIVRFPNITNLCPFGEVFNATR |
| | FASVYAWNRKRISNCVADYSVLYNSASFSTFKCYGVSPTKLN |
| | DLCFTNVYADSFVIRGDEVRQIAPGQTGKIADYNYKLPDDFTG |
| | CVIAWNSNNLDSKVGGNYNYLYRLFRKSNLKPFERDISTEIYQ |
| | AGSTPCNGVEGFNCYFPLQSYGFQPTNGVGYQPYRVVVLSFE |
| | LLHAPATVCGPKKSTNLVKNKCVNFNFNGLTGTGVLTESNKK |
| | FLPFQQFGRDIADTTDAVRDPQTLEILDITPCSFGGVSVITPGTN |
| | TSNQVAVLYQDVNCTEVPVAIHADQLTPTWRVYSTGSNVFQT |
| | RAGCLIGAEHVNNSYECDIPIGAGICASYQTQTNSPGSASSVAS |
| | QSIIAYTMSLGAENSVAYSNNSIAIPTNFTISVTTEILPVSMTKT |
| | SVDCTMYICGDSTECSNLLLQYGSFCTQLNRALTGIAVEQDK |
| | NTQEVFAQVKQIYKTPPIKDFGGFNFSQILPDPSKPSKRSFIEDL |
| | LFNKVTLADAGFIKQYGDCLGDIAARDLICAQKFNGLTVLPPL |
| | LTDEMIAQYTSALLAGTITSGWTFGAGAALQIPFAMQMAYRF |
| | NGIGVTQNVLYENQKLIANQFNSAIGKIQDSLSSTASALGKLQ |
| | DVVNQNAQALNTLVKQLSSNFGAISSVLNDILSRLDPPEAEVQ |
| | IDRLITGRLQSLQTYVTQQLIRAAEIRASANLAATKMSECVLG |
| | QSKRVDFCGKGYHLMSFPQSAPHGVVFLHVTYVPAQEKNFTT |
| | APAICHDGKAHFPREGVFVSNGTHWFVTQRNFYEPQIITTDNT |
| | FVSGNCDVVIGIVNNTVYDPLQPELDSFKEELDKYFKNHTSPD |
| | VDLGDISGINASVVNIQKEIDRLNEVAKNLNESLIDLQELGKYE |
| | QGYIPEAPRDGQAYVRKDGEWVLLSTFL |
| Optimized nucleotide | (SEQ ID NO: 50) |
| sequence encoding the | ATGCCTAATATCACTAACCTGTGTCCTTTCGGTGAAGTGTT |
| receptor-binding | CAACGCCACCAGGTTTGCTAGCGTGTATGCCTGGAACAGG |
| domain of a SARS-CoV- | AAGAGGATCTCTAACTGCGTCGCCGACTATTCCGTGCTGTA |
| 2 S protein with an Fc | TAACAGCGCCTCCTTCTCCACATTCAAATGCTATGGAGTGA |
| region | GCCCGACAAAACTGAACGATCTCTGCTTTACAAATGTCTAC |
| | GCCGACTCTTTTGTGATCAGAGGGGACGAGGTCCGGCAGA |
| | TCGCACCAGGACAGACAGGCAAGATTGCTGACTACAACTA |
| | TAAGCTGCCTGACGACTTCACAGGATGTGTGATCGCATGGA |
| | ACTCAAACAATCTGGACTCCAAAGTCGGGGGCAACTATAA |
| | TTACCTGTATCGCCTGTTCCGGAAGTCCAACCTGAAGCCCT |
| | TCGAGAGGGACATCAGTACAGAGATCTATCAGGCTGGCTC |
| | CACCCCTTGCAATGGCGTCGAAGGCTTTAATTGTTATTTTCC |
| | CCTGCAGTCTTACGGGTTTCAGCCTACTAATGGAGTTGGGT |
| | ACCAGCCATACAGAGTGGTCGTGCTCAGCTTCGAGCTCCTG |
| | CATGCTCCACCTAAGTCCTGCGACAAAACCCATACATGTCC |
| | ACCATGCCCAGCTCCTGAACTGCTCGGCGGGCCTAGTGTTT |
| | TCCTCTTCCCTCCTAAGCCCAAGGATACCCTCATGATCTCTC |
| | GCACACCAGAAGTGACCTGCGTGGTCGTGGATGTCTCTCAC |
| | GAGGATCCTGAAGTGAAGTTTAACTGGTATGTCGACGGAG |
| | TGGAAGTGCACAACGCCAAGACAAAGCCAAGAGAAGAAC |
| | AATACAATTCTACTTATAGGGTGGTGTCTGTGCTGACAGTG |
| | CTGCACCAGGATTGGCTGAATGGAAAAGAATATAAGTGTA |
| | AGGTCTCTAACAAGGCCCTGCCCGCTCCAATTGAGAAGAC |
| | AATTTCCAAGGCCAAGGGGCAGCCTCGGGAACCTCAGGTG |
| | TACACACTGCCCCCATCCAGGGATGAACTGACTAAAAATC |
| | AGGTGTCTCTGACATGCCTGGTGAAAGGGTTTTATCCAAGT |
| | GACATTGCTGTGGAGTGGGAGTCTAATGGGCAGCCTGAAA |
| | ATAACTACAAGACCACACCACCAGTGCTCGATAGCGACGG |
| | GTCTTTCTTTCTGTATTCTAAACTGACCGTGGATAAATCTCG |
| | GTGGCAGCAGGGAAACGTGTTTTCTTGCTCAGTGATGCACG |
| | AAGCTCTGCACAATCACTATACACAGAAATCCCTGTCCCTG |
| | TCTCCAGGCAAATAA |
| Receptor-binding | (SEQ ID NO: 19) |
| domain of a SARS-CoV- | MNITNLCPFGEVFNATRFASVYAWNRKRISNCVADYSVLYNS |
| 2 S protein with an Fc | ASFSTFKCYGVSPTKLNDLCFTNVYADSFVIRGDEVRQIAPGQ |
| region | TGKIADYNYKLPDDFTGCVIAWNSNNLDSKVGGNYNYLYRL |
| | FRKSNLKPFERDISTEIYQAGSTPCNGVEGFNCYFPLQSYGFQP |
| | TNGVGYQPYRVVVLSFELLHAPPKSCDKTHTCPPCPAPELLGG |
| | PSVFLFPPKPKDTLMISRTPEVTCVVVDVSHEDPEVKFNWYVDGV |
| | EVHNAKTKPREEQYNSTYRVVSVLTVLHQDWLNGKEYKCKVSNK |
| | ALPAPIEKTISKAKGQPREPQVYTLPPSRDELTKNQVSLTCLVKGF |
| | YPSDIAVEWESNGQPENNYKTTPPVLDSDGSFFLYSKLTVDKSRW |
| | QQGNVFSCSVMHEALHNHYTQKSLSLSPGK |
| Optimized nucleotide | (SEQ ID NO: 36) |
| sequence encoding a | ATGTTCGTCTTCCTCGTGCTGCTCCCACTCGTTTCTTCCCAG |
| receptor-binding | TGTCCTAATATCACTAACCTGTGTCCTTTCGGTGAAGTGTTC |
| domain of SARS-CoV-2 | AACGCCACCAGGTTTGCTAGCGTGTATGCCTGGAACAGGA |
| S protein with a signal | AGAGGATCTCTAACTGCGTCGCCGACTATTCCGTGCTGTAT |
| sequence and an Fc | AACAGCGCCTCCTTCTCCACATTCAAATGCTATGGAGTGAG |
| region | CCCGACAAAACTGAACGATCTCTGCTTTACAAATGTCTACG |
| | CCGACTCTTTTGTGATCAGAGGGGACGAGGTCCGGCAGATC |
| | GCACCAGGACAGACAGGCAAGATTGCTGACTACAACTATA |
| | AGCTGCCTGACGACTTCACAGGATGTGTGATCGCATGGAAC |
| | TCAAACAATCTGGACTCCAAAGTCGGGGGCAACTATAATT |
| | ACCTGTATCGCCTGTTCCGGAAGTCCAACCTGAAGCCCTTC |
| | GAGAGGGACATCAGTACAGAGATCTATCAGGCTGGCTCCA |
| | CCCCTTGCAATGGCGTCGAAGGCTTTAATTGTTATTTTCCCC |
| | TGCAGTCTTACGGGTTTCAGCCTACTAATGGAGTTGGGTAC |
| | CAGCCATACAGAGTGGTCGTGCTCAGCTTCGAGCTCCTGCA |
| | TGCTCCACCTAAGTCCTGCGACAAAACCCATACATGTCCAC |
| | CATGCCCAGCTCCTGAACTGCTCGGCGGGCCTAGTGTTTTC |
| | CTCTTCCCTCCTAAGCCCAAGGATACCCTCATGATCTCTCG |
| | CACACCAGAAGTGACCTGCGTGGTCGTGGATGTCTCTCACG |
| | AGGATCCTGAAGTGAAGTTTAACTGGTATGTCGACGGAGT |
| | GGAAGTGCACAACGCCAAGACAAAGCCAAGAGAAGAACA |
| | ATACAATTCTACTTATAGGGTGGTGTCTGTGCTGACAGTGC |
| | TGCACCAGGATTGGCTGAATGGAAAAGAATATAAGTGTAA |
| | GGTCTCTAACAAGGCCCTGCCCGCTCCAATTGAGAAGACA |
| | ATTTCCAAGGCCAAGGGGCAGCCTCGGGAACCTCAGGTGT |
| | ACACACTGCCCCCATCCAGGGATGAACTGACTAAAAATCA |
| | GGTGTCTCTGACATGCCTGGTGAAAGGGTTTTATCCAAGTG |
| | ACATTGCTGTGGAGTGGGAGTCTAATGGGCAGCCTGAAAA |
| | TAACTACAAGACCACACCACCAGTGCTCGATAGCGACGGG |
| | TCTTTCTTTCTGTATTCTAAACTGACCGTGGATAAATCTCGG |
| | TGGCAGCAGGGAAACGTGTTTTCTTGCTCAGTGATGCACGA |
| | AGCTCTGCACAATCACTATACACAGAAATCCCTGTCCCTGT |
| | CTCCAGGCAAATAA |
| Receptor-binding | (SEQ ID NO: 20) |
| domain of a SARS-CoV- | MFVFLVLLPLVSSQCPNITNLCPFGEVFNATRFASVYAWNRKR |
| 2 S protein with a signal | ISNCVADYSVLYNSASFSTFKCYGVSPTKLNDLCFTNVYADSF |
| sequence and an Fc | VIRGDEVRQIAPGQTGKIADYNYKLPDDFTGCVIAWNSNNLD |
| region | SKVGGNYNYLYRLFRKSNLKPFERDISTEIYQAGSTPCNGVEG |
| | FNCYFPLQSYGFQPTNGVGYQPYRVVVLSFELLHAPPKSCDKT |
| | HTCPPCPAPELLGGPSVFLFPPKPKDTLMISRTPEVTCVVVDVSH |
| | EDPEVKFNWYVDGVEVHNAKTKPREEQYNSTYRVVSVLTVLHQD |
| | WLNGKEYKCKVSNKALPAPIEKTISKAKGQPREPQVYTLPPSRDE |
| | LTKNQVSLTCLVKGFYPSDIAVEWESNGQPENNYKTTPPVLDSDG |
| | SFFLYSKLTVDKSRWQQGNVFSCSVMHEALHNHYTQKSLSLSPGK |
| Optimized nucleotide | (SEQ ID NO: 69) |
| sequence encoding a S2 | ATGTTCGTCTTCCTCGTGCTGCTCCCACTCGTTTCTTCCCAG |
| subunit of a SARS-CoV- | TGTTCCGTTGCTAGTCAGTCTATTATTGCCTATACCATGAGC |
| 2 S protein, which has | CTCGGAGCTGAGAATAGCGTGGCCTACTCCAATAATTCCAT |
| been modified to remove | CGCAATCCCTACTAACTTCACTATTTCTGTGACCACCGAGA |
| residues 986 and 987 | TCCTGCCTGTGTCTATGACTAAGACTAGCGTTGATTGTACC |
| with proline, with a | ATGTATATTTGTGGCGACTCTACCGAATGTTCTAACCTGCT |
| signal sequence | GCTTCAGTACGGCTCATTTTGCACACAGCTGAACAGAGCCC |
| | TGACTGGGATCGCTGTGGAGCAGGACAAGAACACACAGGA |
| | GGTGTTTGCACAGGTGAAGCAGATCTATAAGACCCCTCCTA |
| | TTAAGGATTTCGGCGGATTCAATTTCTCACAGATTCTGCCA |
| | GACCCCAGTAAGCCTTCCAAGAGGAGCTTCATCGAGGATCT |
| | CCTGTTTAACAAGGTGACCCTGGCAGACGCCGGCTTTATTA |
| | AGCAATATGGGGATTGCCTGGGCGACATTGCTGCCAGAGA |
| | CCTGATTTGCGCCCAGAAATTCAATGGCCTCACAGTGCTGC |
| | CACCTCTGCTGACCGACGAGATGATCGCTCAATACACTAGC |
| | GCACTGCTGGCCGGAACCATCACATCAGGCTGGACCTTCGG |
| | GGCCGGAGCAGCACTGCAGATTCCATTCGCCATGCAGATG |
| | GCCTATAGATTCAACGGCATTGGCGTCACACAGAACGTGCT |
| | GTACGAAAACCAGAAGCTCATCGCTAACCAGTTTAATTCCG |
| | CAATTGGAAAGATCCAAGATTCACTCAGCTCAACCGCCTCT |
| | GCACTCGGAAAGCTGCAGGACGTGGTCAACCAGAATGCTC |
| | AGGCCCTGAACACACTCGTCAAGCAGCTGTCCTCTAACTTT |
| | GGCGCTATCAGCTCCGTTCTGAACGACATTCTGAGCCGCCT |
| | GGATCCCCCAGAGGCTGAAGTCCAGATTGACCGCCTGATTA |
| | CCGGCCGGCTGCAGTCTCTGCAAACATACGTGACCCAGCA |
| | GCTGATCAGAGCAGCCGAGATCCGGGCATCCGCAAATCTG |
| | GCAGCAACTAAGATGAGCGAATGCGTGCTGGGCCAGTCCA |
| | AGCGGGTGGACTTTTGTGGCAAGGGCTACCACCTGATGAG |
| | CTTCCCCCAGAGCGCCCCACATGGCGTTGTTTTTCTGCACG |
| | TGACCTATGTCCCTGCTCAGGAAAAGAACTTTACAACTGCT |
| | CCTGCTATCTGCCATGACGGCAAGGCCCACTTCCCACGGGA |
| | GGGAGTGTTTGTGTCCAATGGCACACACTGGTTCGTGACCC |
| | AGAGGAACTTCTATGAACCCCAGATCATCACCACTGACAAT |
| | ACCTTCGTGTCTGGAAATTGCGACGTCGTGATCGGCATCGT |
| | TAACAACACCGTGTACGACCCTCTCCAGCCAGAGCTGGACT |
| | CCTTTAAGGAGGAACTGGATAAGTATTTTAAGAACCACAC |
| | AAGCCCAGATGTGGATCTCGGGGACATCTCCGGAATTAAC |
| | GCCTCCGTGGTGAATATCCAGAAGGAGATTGACCGCCTAA |
| | ATGAAGTTGCCAAGAACCTCAATGAGTCTCTGATTGATCTG |
| | CAGGAACTGGGCAAGTATGAGCAGTATATCAAATGGCCCT |
| | GGTACATTTGGCTGGGGTTTATCGCCGGACTGATTGCCATC |
| | GTCATGGTGACCATCATGCTGTGTTGCATGACCTCCTGTTG |
| | TTCCTGTCTGAAGGGCTGCTGTAGTTGCGGCTCTTGCTGTA |
| | AATTCGACGAAGATGATAGCGAGCCCGTGCTGAAGGGCGT |
| | GAAGCTGCATTATACCTGA |
| S2 subunit of a SARS- | (SEQ ID NO: 70) |
| CoV-2 S protein, which | MFVFLVLLPLVSSQCSVASQSIIAYTMSLGAENSVAYSNNSIAI |
| has been modified to | PTNFTISVTTEILPVSMTKTSVDCTMYICGDSTECSNLLLQYGS |
| remove residues 986 and | FCTQLNRALTGIAVEQDKNTQEVFAQVKQIYKTPPIKDFGGFN |
| 987 with proline, with a | FSQILPDPSKPSKRSFIEDLLFNKVTLADAGFIKQYGDCLGDIA |
| signal sequence | ARDLICAQKFNGLTVLPPLLTDEMIAQYTSALLAGTITSGWTF |
| | GAGAALQIPFAMQMAYRFNGIGVTQNVLYENQKLIANQFNSA |
| | IGKIQDSLSSTASALGKLQDVVNQNAQALNTLVKQLSSNFGAI |
| | SSVLNDILSRLDPPEAEVQIDRLITGRLQSLQTYVTQQLIRAAEI |
| | RASANLAATKMSECVLGQSKRVDFCGKGYHLMSFPQSAPHG |
| | VVFLHVTYVPAQEKNFTTAPAICHDGKAHFPREGVFVSNGTH |
| | WFVTQRNFYEPQIITTDNTFVSGNCDVVIGIVNNTVYDPLQPE |
| | LDSFKEELDKYFKNHTSPDVDLGDISGINASVVNIQKEIDRLNE |
| | VAKNLNESLIDLQELGKYEQYIKWPWYIWLGFIAGLIAIVMVT |
| | IMLCCMTSCCSCLKGCCSCGSCCKFDEDDSEPVLKGVKLHYT |
| Optimized nucleotide | (SEQ ID NO: 75) |
| sequence encoding a | ATGTTCGTCTTCCTCGTGCTGCTCCCACTCGTTTCTTCCCAG |
| ectodomain of the S2 | TGTTCCGTTGCTAGTCAGTCTATTATTGCCTATACCATGAGC |
| subunit of a SARS-CoV- | CTCGGAGCTGAGAATAGCGTGGCCTACTCCAATAATTCCAT |
| 2 S protein with a signal | CGCAATCCCTACTAACTTCACTATTTCTGTGACCACCGAGA |
| sequence and a Foldon | TCCTGCCTGTGTCTATGACTAAGACTAGCGTTGATTGTACC |
| | ATGTATATTTGTGGCGACTCTACCGAATGTTCTAACCTGCT |
| | GCTTCAGTACGGCTCATTTTGCACACAGCTGAACAGAGCCC |
| | TGACTGGGATCGCTGTGGAGCAGGACAAGAACACACAGGA |
| | GGTGTTTGCACAGGTGAAGCAGATCTATAAGACCCCTCCTA |
| | TTAAGGATTTCGGCGGATTCAATTTCTCACAGATTCTGCCA |
| | GACCCCAGTAAGCCTTCCAAGAGGAGCTTCATCGAGGATCT |
| | CCTGTTTAACAAGGTGACCCTGGCAGACGCCGGCTTTATTA |
| | AGCAATATGGGGATTGCCTGGGCGACATTGCTGCCAGAGA |
| | CCTGATTTGCGCCCAGAAATTCAATGGCCTCACAGTGCTGC |
| | CACCTCTGCTGACCGACGAGATGATCGCTCAATACACTAGC |
| | GCACTGCTGGCCGGAACCATCACATCAGGCTGGACCTTCGG |
| | GGCCGGAGCAGCACTGCAGATTCCATTCGCCATGCAGATG |
| | GCCTATAGATTCAACGGCATTGGCGTCACACAGAACGTGCT |
| | GTACGAAAACCAGAAGCTCATCGCTAACCAGTTTAATTCCG |
| | CAATTGGAAAGATCCAAGATTCACTCAGCTCAACCGCCTCT |
| | GCACTCGGAAAGCTGCAGGACGTGGTCAACCAGAATGCTC |
| | AGGCCCTGAACACACTCGTCAAGCAGCTGTCCTCTAACTTT |
| | GGCGCTATCAGCTCCGTTCTGAACGACATTCTGAGCCGCCT |
| | GGATAAGGTGGAGGCTGAAGTCCAGATTGACCGCCTGATT |
| | ACCGGCCGGCTGCAGTCTCTGCAAACATACGTGACCCAGC |
| | AGCTGATCAGAGCAGCCGAGATCCGGGCATCCGCAAATCT |
| | GGCAGCAACTAAGATGAGCGAATGCGTGCTGGGCCAGTCC |
| | AAGCGGGTGGACTTTTGTGGCAAGGGCTACCACCTGATGA |
| | GCTTCCCCCAGAGCGCCCCACATGGCGTTGTTTTTCTGCAC |
| | GTGACCTATGTCCCTGCTCAGGAAAAGAACTTTACAACTGC |
| | TCCTGCTATCTGCCATGACGGCAAGGCCCACTTCCCACGGG |
| | AGGGAGTGTTTGTGTCCAATGGCACACACTGGTTCGTGACC |
| | CAGAGGAACTTCTATGAACCCCAGATCATCACCACTGACA |
| | ATACCTTCGTGTCTGGAAATTGCGACGTCGTGATCGGCATC |
| | GTTAACAACACCGTGTACGACCCTCTCCAGCCAGAGCTGGA |
| | CTCCTTTAAGGAGGAACTGGATAAGTATTTTAAGAACCACA |
| | CAAGCCCAGATGTGGATCTCGGGGACATCTCCGGAATTAA |
| | CGCCTCCGTGGTGAATATCCAGAAGGAGATTGACCGCCTA |
| | AATGAAGTTGCCAAGAACCTCAATGAGTCTCTGATTGATCT |
| | GCAGGAACTGGGCAAGTATGAGCAGGGGTACATTCCCGAG |
| | GCTCCTAGGGACGGCCAGGCATACGTGCGCAAAGACGGCG |
| | AGTGGGTGCTGCTGTCCACATTCCTGTGA |
| S2 subunit of a SARS- | (SEQ ID NO: 76) |
| CoV-2 S protein with a | MFVFLVLLPLVSSQCSVASQSIIAYTMSLGAENSVAYSNNSIAI |
| signal sequence and a | PTNFTISVTTEILPVSMTKTSVDCTMYICGDSTECSNLLLQYGS |
| Foldon | FCTQLNRALTGIAVEQDKNTQEVFAQVKQIYKTPPIKDFGGFN |
| | FSQILPDPSKPSKRSFIEDLLFNKVTLADAGFIKQYGDCLGDIA |
| | ARDLICAQKFNGLTVLPPLLTDEMIAQYTSALLAGTITSGWTF |
| | GAGAALQIPFAMQMAYRFNGIGVTQNVLYENQKLIANQFNSA |
| | IGKIQDSLSSTASALGKLQDVVNQNAQALNTLVKQLSSNFGAI |
| | SSVLNDILSRLDKVEAEVQIDRLITGRLQSLQTYVTQQLIRAAE |
| | IRASANLAATKMSECVLGQSKRVDFCGKGYHLMSFPQSAPHG |
| | VVFLHVTYVPAQEKNFTTAPAICHDGKAHFPREGVFVSNGTH |
| | WFVTQRNFYEPQIITTDNTFVSGNCDVVIGIVNNTVYDPLQPE |
| | LDSFKEELDKYFKNHTSPDVDLGDISGINASVVNIQKEIDRLNE |
| | VAKNLNESLIDLQELGKYEQGYIPEAPRDGQAYVRKDGEWVLL |
| | STFL |
| Optimized nucleotide | (SEQ ID NO: 77) |
| sequence encoding the | ATGTTCGTCTTCCTCGTGCTGCTCCCACTCGTTTCTTCCCAG |
| S2 subunit of a SARS- | TGTTCCGTTGCTAGTCAGTCTATTATTGCCTATACCATGAGC |
| CoV-2 S protein, which | CTCGGAGCTGAGAATAGCGTGGCCTACTCCAATAATTCCAT |
| has been modified to | CGCAATCCCTACTAACTTCACTATTTCTGTGACCACCGAGA |
| remove residues 986 and | TCCTGCCTGTGTCTATGACTAAGACTAGCGTTGATTGTACC |
| 987 with proline, with a | ATGTATATTTGTGGCGACTCTACCGAATGTTCTAACCTGCT |
| signal sequence | GCTTCAGTACGGCTCATTTTGCACACAGCTGAACAGAGCCC |
| | TGACTGGGATCGCTGTGGAGCAGGACAAGAACACACAGGA |
| | GGTGTTTGCACAGGTGAAGCAGATCTATAAGACCCCTCCTA |
| | TTAAGGATTTCGGCGGATTCAATTTCTCACAGATTCTGCCA |
| | GACCCCAGTAAGCCTTCCAAGAGGAGCTTCATCGAGGATCT |
| | CCTGTTTAACAAGGTGACCCTGGCAGACGCCGGCTTTATTA |
| | AGCAATATGGGGATTGCCTGGGCGACATTGCTGCCAGAGA |
| | CCTGATTTGCGCCCAGAAATTCAATGGCCTCACAGTGCTGC |
| | CACCTCTGCTGACCGACGAGATGATCGCTCAATACACTAGC |
| | GCACTGCTGGCCGGAACCATCACATCAGGCTGGACCTTCGG |
| | GGCCGGAGCAGCACTGCAGATTCCATTCGCCATGCAGATG |
| | GCCTATAGATTCAACGGCATTGGCGTCACACAGAACGTGCT |
| | GTACGAAAACCAGAAGCTCATCGCTAACCAGTTTAATTCCG |
| | CAATTGGAAAGATCCAAGATTCACTCAGCTCAACCGCCTCT |
| | GCACTCGGAAAGCTGCAGGACGTGGTCAACCAGAATGCTC |
| | AGGCCCTGAACACACTCGTCAAGCAGCTGTCCTCTAACTTT |
| | GGCGCTATCAGCTCCGTTCTGAACGACATTCTGAGCCGCCT |
| | GGATCCCCCAGAGGCTGAAGTCCAGATTGACCGCCTGATTA |
| | CCGGCCGGCTGCAGTCTCTGCAAACATACGTGACCCAGCA |
| | GCTGATCAGAGCAGCCGAGATCCGGGCATCCGCAAATCTG |
| | GCAGCAACTAAGATGAGCGAATGCGTGCTGGGCCAGTCCA |
| | AGCGGGTGGACTTTTGTGGCAAGGGCTACCACCTGATGAG |
| | CTTCCCCCAGAGCGCCCCACATGGCGTTGTTTTTCTGCACG |
| | TGACCTATGTCCCTGCTCAGGAAAAGAACTTTACAACTGCT |
| | CCTGCTATCTGCCATGACGGCAAGGCCCACTTCCCACGGGA |
| | GGGAGTGTTTGTGTCCAATGGCACACACTGGTTCGTGACCC |
| | AGAGGAACTTCTATGAACCCCAGATCATCACCACTGACAAT |
| | ACCTTCGTGTCTGGAAATTGCGACGTCGTGATCGGCATCGT |
| | TAACAACACCGTGTACGACCCTCTCCAGCCAGAGCTGGACT |
| | CCTTTAAGGAGGAACTGGATAAGTATTTTAAGAACCACAC |
| | AAGCCCAGATGTGGATCTCGGGGACATCTCCGGAATTAAC |
| | GCCTCCGTGGTGAATATCCAGAAGGAGATTGACCGCCTAA |
| | ATGAAGTTGCCAAGAACCTCAATGAGTCTCTGATTGATCTG |
| | CAGGAACTGGGCAAGTATGAGCAGTGA |
| S2 subunit of a SARS- | (SEQ ID NO: 78) |
| CoV-2 S protein which | MFVFLVLLPLVSSQCSVASQSIIAYTMSLGAENSVAYSNNSIAI |
| has been modified to | PTNFTISVTTEILPVSMTKTSVDCTMYICGDSTECSNLLLQYGS |
| remove residues 986 and | FCTQLNRALTGIAVEQDKNTQEVFAQVKQIYKTPPIKDFGGFN |
| 987 with proline | FSQILPDPSKPSKRSFIEDLLFNKVTLADAGFIKQYGDCLGDIA |
| | ARDLICAQKFNGLTVLPPLLTDEMIAQYTSALLAGTITSGWTF |
| | GAGAALQIPFAMQMAYRFNGIGVTQNVLYENQKLIANQFNSA |
| | IGKIQDSLSSTASALGKLQDVVNQNAQALNTLVKQLSSNFGAI |
| | SSVLNDILSRLDPPEAEVQIDRLITGRLQSLQTYVTQQLIRAAEI |
| | RASANLAATKMSECVLGQSKRVDFCGKGYHLMSFPQSAPHG |
| | VVFLHVTYVPAQEKNFTTAPAICHDGKAHFPREGVFVSNGTH |
| | WFVTQRNFYEPQIITTDNTFVSGNCDVVIGIVNNTVYDPLQPE |
| | LDSFKEELDKYFKNHTSPDVDLGDISGINASVVNIQKEIDRLNE |
| | VAKNLNESLIDLQELGKYEQ |
| Optimized nucleotide | (SEQ ID NO: 79) |
| sequence encoding S2 | ATGTTCGTCTTCCTCGTGCTGCTCCCACTCGTTTCTTCCCAG |
| subunit of a SARS-CoV- | TGTTCCGTTGCTAGTCAGTCTATTATTGCCTATACCATGAGC |
| 2 S protein with a signal | CTCGGAGCTGAGAATAGCGTGGCCTACTCCAATAATTCCAT |
| sequence, which has | CGCAATCCCTACTAACTTCACTATTTCTGTGACCACCGAGA |
| been modified to remove | TCCTGCCTGTGTCTATGACTAAGACTAGCGTTGATTGTACC |
| residues 986 and 987 | ATGTATATTTGTGGCGACTCTACCGAATGTTCTAACCTGCT |
| with proline, and a | GCTTCAGTACGGCTCATTTTGCACACAGCTGAACAGAGCCC |
| Foldon | TGACTGGGATCGCTGTGGAGCAGGACAAGAACACACAGGA |
| | GGTGTTTGCACAGGTGAAGCAGATCTATAAGACCCCTCCTA |
| | TTAAGGATTTCGGCGGATTCAATTTCTCACAGATTCTGCCA |
| | GACCCCAGTAAGCCTTCCAAGAGGAGCTTCATCGAGGATCT |
| | CCTGTTTAACAAGGTGACCCTGGCAGACGCCGGCTTTATTA |
| | AGCAATATGGGGATTGCCTGGGCGACATTGCTGCCAGAGA |
| | CCTGATTTGCGCCCAGAAATTCAATGGCCTCACAGTGCTGC |
| | CACCTCTGCTGACCGACGAGATGATCGCTCAATACACTAGC |
| | GCACTGCTGGCCGGAACCATCACATCAGGCTGGACCTTCGG |
| | GGCCGGAGCAGCACTGCAGATTCCATTCGCCATGCAGATG |
| | GCCTATAGATTCAACGGCATTGGCGTCACACAGAACGTGCT |
| | GTACGAAAACCAGAAGCTCATCGCTAACCAGTTTAATTCCG |
| | CAATTGGAAAGATCCAAGATTCACTCAGCTCAACCGCCTCT |
| | GCACTCGGAAAGCTGCAGGACGTGGTCAACCAGAATGCTC |
| | AGGCCCTGAACACACTCGTCAAGCAGCTGTCCTCTAACTTT |
| | GGCGCTATCAGCTCCGTTCTGAACGACATTCTGAGCCGCCT |
| | GGATCCCCCAGAGGCTGAAGTCCAGATTGACCGCCTGATTA |
| | CCGGCCGGCTGCAGTCTCTGCAAACATACGTGACCCAGCA |
| | GCTGATCAGAGCAGCCGAGATCCGGGCATCCGCAAATCTG |
| | GCAGCAACTAAGATGAGCGAATGCGTGCTGGGCCAGTCCA |
| | AGCGGGTGGACTTTTGTGGCAAGGGCTACCACCTGATGAG |
| | CTTCCCCCAGAGCGCCCCACATGGCGTTGTTTTTCTGCACG |
| | TGACCTATGTCCCTGCTCAGGAAAAGAACTTTACAACTGCT |
| | CCTGCTATCTGCCATGACGGCAAGGCCCACTTCCCACGGGA |
| | GGGAGTGTTTGTGTCCAATGGCACACACTGGTTCGTGACCC |
| | AGAGGAACTTCTATGAACCCCAGATCATCACCACTGACAAT |
| | ACCTTCGTGTCTGGAAATTGCGACGTCGTGATCGGCATCGT |
| | TAACAACACCGTGTACGACCCTCTCCAGCCAGAGCTGGACT |
| | CCTTTAAGGAGGAACTGGATAAGTATTTTAAGAACCACAC |
| | AAGCCCAGATGTGGATCTCGGGGACATCTCCGGAATTAAC |
| | GCCTCCGTGGTGAATATCCAGAAGGAGATTGACCGCCTAA |
| | ATGAAGTTGCCAAGAACCTCAATGAGTCTCTGATTGATCTG |
| | CAGGAACTGGGCAAGTATGAGCAGGGGTACATTCCCGAGG |
| | CTCCTAGGGACGGCCAGGCATACGTGCGCAAAGACGGCGA |
| | GTGGGTGCTGCTGTCCACATTCCTGTGA |
| S2 subunit of a SARS- | (SEQ ID NO: 80) |
| CoV-2 S protein, which | MFVFLVLLPLVSSQCSVASQSIIAYTMSLGAENSVAYSNNSIAI |
| has been modified to | PTNFTISVTTEILPVSMTKTSVDCTMYICGDSTECSNLLLQYGS |
| remove residues 986 and | FCTQLNRALTGIAVEQDKNTQEVFAQVKQIYKTPPIKDFGGFN |
| 987 with proline, with a | FSQILPDPSKPSKRSFIEDLLFNKVTLADAGFIKQYGDCLGDIA |
| signal sequence and a | ARDLICAQKFNGLTVLPPLLTDEMIAQYTSALLAGTITSGWTF |
| Foldon | GAGAALQIPFAMQMAYRFNGIGVTQNVLYENQKLIANQFNSA |
| | IGKIQDSLSSTASALGKLQDVVNQNAQALNTLVKQLSSNFGAI |
| | SSVLNDILSRLDPPEAEVQIDRLITGRLQSLQTYVTQQLIRAAEI |
| | RASANLAATKMSECVLGQSKRVDFCGKGYHLMSFPQSAPHG |
| | VVFLHVTYVPAQEKNFTTAPAICHDGKAHFPREGVFVSNGTH |
| | WFVTQRNFYEPQIITTDNTFVSGNCDVVIGIVNNTVYDPLQPE |
| | LDSFKEELDKYFKNHTSPDVDLGDISGINASVVNIQKEIDRLNE |
| | VAKNLNESLIDLQELGKYEQGYIPEAPRDGQAYVRKDGEWVLL |
| | STFL |
| Optimized nucleotide | (SEQ ID NO: 81) |
| sequence encoding the | ATGTTCGTCTTCCTCGTGCTGCTCCCACTCGTTTCTTCCCAG |
| S2′ subunit of a SARS- | TGTAGCTTCATCGAGGATCTCCTGTTTAACAAGGTGACCCT |
| CoV-2 S protein, which | GGCAGACGCCGGCTTTATTAAGCAATATGGGGATTGCCTGG |
| has been modified to | GCGACATTGCTGCCAGAGACCTGATTTGCGCCCAGAAATTC |
| remove residues 986 and | AATGGCCTCACAGTGCTGCCACCTCTGCTGACCGACGAGAT |
| 987 with proline, with a | GATCGCTCAATACACTAGCGCACTGCTGGCCGGAACCATCA |
| signal sequence | CATCAGGCTGGACCTTCGGGGCCGGAGCAGCACTGCAGAT |
| | TCCATTCGCCATGCAGATGGCCTATAGATTCAACGGCATTG |
| | GCGTCACACAGAACGTGCTGTACGAAAACCAGAAGCTCAT |
| | CGCTAACCAGTTTAATTCCGCAATTGGAAAGATCCAAGATT |
| | CACTCAGCTCAACCGCCTCTGCACTCGGAAAGCTGCAGGAC |
| | GTGGTCAACCAGAATGCTCAGGCCCTGAACACACTCGTCA |
| | AGCAGCTGTCCTCTAACTTTGGCGCTATCAGCTCCGTTCTG |
| | AACGACATTCTGAGCCGCCTGGATCCCCCAGAGGCTGAAG |
| | TCCAGATTGACCGCCTGATTACCGGCCGGCTGCAGTCTCTG |
| | CAAACATACGTGACCCAGCAGCTGATCAGAGCAGCCGAGA |
| | TCCGGGCATCCGCAAATCTGGCAGCAACTAAGATGAGCGA |
| | ATGCGTGCTGGGCCAGTCCAAGCGGGTGGACTTTTGTGGCA |
| | AGGGCTACCACCTGATGAGCTTCCCCCAGAGCGCCCCACAT |
| | GGCGTTGTTTTTCTGCACGTGACCTATGTCCCTGCTCAGGA |
| | AAAGAACTTTACAACTGCTCCTGCTATCTGCCATGACGGCA |
| | AGGCCCACTTCCCACGGGAGGGAGTGTTTGTGTCCAATGGC |
| | ACACACTGGTTCGTGACCCAGAGGAACTTCTATGAACCCCA |
| | GATCATCACCACTGACAATACCTTCGTGTCTGGAAATTGCG |
| | ACGTCGTGATCGGCATCGTTAACAACACCGTGTACGACCCT |
| | CTCCAGCCAGAGCTGGACTCCTTTAAGGAGGAACTGGATA |
| | AGTATTTTAAGAACCACACAAGCCCAGATGTGGATCTCGG |
| | GGACATCTCCGGAATTAACGCCTCCGTGGTGAATATCCAGA |
| | AGGAGATTGACCGCCTAAATGAAGTTGCCAAGAACCTCAA |
| | TGAGTCTCTGATTGATCTGCAGGAACTGGGCAAGTATGAGC |
| | AGTGA |
| S2′ subunit of a SARS- | (SEQ ID NO: 82) |
| CoV-2 S protein, which | MFVFLVLLPLVSSQCSFIEDLLFNKVTLADAGFIKQYGDCLGDI |
| has been modified to | AARDLICAQKFNGLTVLPPLLTDEMIAQYTSALLAGTITSGWT |
| remove residues 986 and | FGAGAALQIPFAMQMAYRFNGIGVTQNVLYENQKLIANQFNS |
| 987 with proline, with a | AIGKIQDSLSSTASALGKLQDVVNQNAQALNTLVKQLSSNFG |
| signal sequence | AISSVLNDILSRLDPPEAEVQIDRLITGRLQSLQTYVTQQLIRA |
| | AEIRASANLAATKMSECVLGQSKRVDFCGKGYHLMSFPQSAP |
| | HGVVFLHVTYVPAQEKNFTTAPAICHDGKAHFPREGVFVSNG |
| | THWFVTQRNFYEPQIITTDNTFVSGNCDVVIGIVNNTVYDPLQ |
| | PELDSFKEELDKYFKNHTSPDVDLGDISGINASVVNIQKEIDRL |
| | NEVAKNLNESLIDLQELGKYEQ |
| Optimized nucleotide | (SEQ ID NO: 83) |
| sequence encoding the | ATGTTCGTCTTCCTCGTGCTGCTCCCACTCGTTTCTTCCCAG |
| S2′ subunit of a SARS- | TGTAGCTTCATCGAGGATCTCCTGTTTAACAAGGTGACCCT |
| CoV-2 S protein, which | GGCAGACGCCGGCTTTATTAAGCAATATGGGGATTGCCTGG |
| has been modified to | GCGACATTGCTGCCAGAGACCTGATTTGCGCCCAGAAATTC |
| remove residues 986 and | AATGGCCTCACAGTGCTGCCACCTCTGCTGACCGACGAGAT |
| 987 with proline, with a | GATCGCTCAATACACTAGCGCACTGCTGGCCGGAACCATCA |
| signal sequence and a | CATCAGGCTGGACCTTCGGGGCCGGAGCAGCACTGCAGAT |
| Foldon | TCCATTCGCCATGCAGATGGCCTATAGATTCAACGGCATTG |
| | GCGTCACACAGAACGTGCTGTACGAAAACCAGAAGCTCAT |
| | CGCTAACCAGTTTAATTCCGCAATTGGAAAGATCCAAGATT |
| | CACTCAGCTCAACCGCCTCTGCACTCGGAAAGCTGCAGGAC |
| | GTGGTCAACCAGAATGCTCAGGCCCTGAACACACTCGTCA |
| | AGCAGCTGTCCTCTAACTTTGGCGCTATCAGCTCCGTTCTG |
| | AACGACATTCTGAGCCGCCTGGATCCCCCAGAGGCTGAAG |
| | TCCAGATTGACCGCCTGATTACCGGCCGGCTGCAGTCTCTG |
| | CAAACATACGTGACCCAGCAGCTGATCAGAGCAGCCGAGA |
| | TCCGGGCATCCGCAAATCTGGCAGCAACTAAGATGAGCGA |
| | ATGCGTGCTGGGCCAGTCCAAGCGGGTGGACTTTTGTGGCA |
| | AGGGCTACCACCTGATGAGCTTCCCCCAGAGCGCCCCACAT |
| | GGCGTTGTTTTTCTGCACGTGACCTATGTCCCTGCTCAGGA |
| | AAAGAACTTTACAACTGCTCCTGCTATCTGCCATGACGGCA |
| | AGGCCCACTTCCCACGGGAGGGAGTGTTTGTGTCCAATGGC |
| | ACACACTGGTTCGTGACCCAGAGGAACTTCTATGAACCCCA |
| | GATCATCACCACTGACAATACCTTCGTGTCTGGAAATTGCG |
| | ACGTCGTGATCGGCATCGTTAACAACACCGTGTACGACCCT |
| | CTCCAGCCAGAGCTGGACTCCTTTAAGGAGGAACTGGATA |
| | AGTATTTTAAGAACCACACAAGCCCAGATGTGGATCTCGG |
| | GGACATCTCCGGAATTAACGCCTCCGTGGTGAATATCCAGA |
| | AGGAGATTGACCGCCTAAATGAAGTTGCCAAGAACCTCAA |
| | TGAGTCTCTGATTGATCTGCAGGAACTGGGCAAGTATGAGC |
| | AGGGGTACATTCCCGAGGCTCCTAGGGACGGCCAGGCATA |
| | CGTGCGCAAAGACGGCGAGTGGGTGCTGCTGTCCACATTCC |
| | TGTGA |
| S2′ subunit of a SARS- | (SEQ ID NO: 84) |
| CoV-2 S protein, which | MFVFLVLLPLVSSQCSFIEDLLFNKVTLADAGFIKQYGDCLGDI |
| has been modified to | AARDLICAQKFNGLTVLPPLLTDEMIAQYTSALLAGTITSGWT |
| remove residues 986 and | FGAGAALQIPFAMQMAYRFNGIGVTQNVLYENQKLIANQFNS |
| 987 with proline, with a | AIGKIQDSLSSTASALGKLQDVVNQNAQALNTLVKQLSSNFG |
| signal sequence and a | AISSVLNDILSRLDPPEAEVQIDRLITGRLQSLQTYVTQQLIRA |
| Foldon | AEIRASANLAATKMSECVLGQSKRVDFCGKGYHLMSFPQSAP |
| | HGVVFLHVTYVPAQEKNFTTAPAICHDGKAHFPREGVFVSNG |
| | THWFVTQRNFYEPQIITTDNTFVSGNCDVVIGIVNNTVYDPLQ |
| | PELDSFKEELDKYFKNHTSPDVDLGDISGINASVVNIQKEIDRL |
| | NEVAKNLNESLIDLQELGKYEQGYIPEAPRDGQAYVRKDGEWV |
| | LLSTFL |
| Optimized nucleotide | (SEQ ID NO: 85) |
| sequence encoding the | ATGTTCGTCTTCCTCGTGCTGCTCCCACTCGTTTCTTCCCAG |
| full length S2′ subunit of | TGTAGCTTCATCGAGGATCTCCTGTTTAACAAGGTGACCCT |
| a SARS-CoV-2 S | GGCAGACGCCGGCTTTATTAAGCAATATGGGGATTGCCTGG |
| protein, which has been | GCGACATTGCTGCCAGAGACCTGATTTGCGCCCAGAAATTC |
| modified to remove | AATGGCCTCACAGTGCTGCCACCTCTGCTGACCGACGAGAT |
| residues 986 and 987 | GATCGCTCAATACACTAGCGCACTGCTGGCCGGAACCATCA |
| with proline, with a | CATCAGGCTGGACCTTCGGGGCCGGAGCAGCACTGCAGAT |
| signal sequence | TCCATTCGCCATGCAGATGGCCTATAGATTCAACGGCATTG |
| | GCGTCACACAGAACGTGCTGTACGAAAACCAGAAGCTCAT |
| | CGCTAACCAGTTTAATTCCGCAATTGGAAAGATCCAAGATT |
| | CACTCAGCTCAACCGCCTCTGCACTCGGAAAGCTGCAGGAC |
| | GTGGTCAACCAGAATGCTCAGGCCCTGAACACACTCGTCA |
| | AGCAGCTGTCCTCTAACTTTGGCGCTATCAGCTCCGTTCTG |
| | AACGACATTCTGAGCCGCCTGGATCCCCCAGAGGCTGAAG |
| | TCCAGATTGACCGCCTGATTACCGGCCGGCTGCAGTCTCTG |
| | CAAACATACGTGACCCAGCAGCTGATCAGAGCAGCCGAGA |
| | TCCGGGCATCCGCAAATCTGGCAGCAACTAAGATGAGCGA |
| | ATGCGTGCTGGGCCAGTCCAAGCGGGTGGACTTTTGTGGCA |
| | AGGGCTACCACCTGATGAGCTTCCCCCAGAGCGCCCCACAT |
| | GGCGTTGTTTTTCTGCACGTGACCTATGTCCCTGCTCAGGA |
| | AAAGAACTTTACAACTGCTCCTGCTATCTGCCATGACGGCA |
| | AGGCCCACTTCCCACGGGAGGGAGTGTTTGTGTCCAATGGC |
| | ACACACTGGTTCGTGACCCAGAGGAACTTCTATGAACCCCA |
| | GATCATCACCACTGACAATACCTTCGTGTCTGGAAATTGCG |
| | ACGTCGTGATCGGCATCGTTAACAACACCGTGTACGACCCT |
| | CTCCAGCCAGAGCTGGACTCCTTTAAGGAGGAACTGGATA |
| | AGTATTTTAAGAACCACACAAGCCCAGATGTGGATCTCGG |
| | GGACATCTCCGGAATTAACGCCTCCGTGGTGAATATCCAGA |
| | AGGAGATTGACCGCCTAAATGAAGTTGCCAAGAACCTCAA |
| | TGAGTCTCTGATTGATCTGCAGGAACTGGGCAAGTATGAGC |
| | AGTATATCAAATGGCCCTGGTACATTTGGCTGGGGTTTATC |
| | GCCGGACTGATTGCCATCGTCATGGTGACCATCATGCTGTG |
| | TTGCATGACCTCCTGTTGTTCCTGTCTGAAGGGCTGCTGTA |
| | GTTGCGGCTCTTGCTGTAAATTCGACGAAGATGATAGCGAG |
| | CCCGTGCTGAAGGGCGTGAAGCTGCATTATACCTGA |
| The full length S2′ | (SEQ ID NO: 86) |
| subunit of a SARS-CoV- | MFVFLVLLPLVSSQCSFIEDLLFNKVTLADAGFIKQYGDCLGDI |
| 2 S protein, which has | AARDLICAQKFNGLTVLPPLLTDEMIAQYTSALLAGTITSGWT |
| been modified to remove | FGAGAALQIPFAMQMAYRFNGIGVTQNVLYENQKLIANQFNS |
| residues 986 and 987 | AIGKIQDSLSSTASALGKLQDVVNQNAQALNTLVKQLSSNFG |
| with proline, with a | AISSVLNDILSRLDPPEAEVQIDRLITGRLQSLQTYVTQQLIRA |
| signal sequence | AEIRASANLAATKMSECVLGQSKRVDFCGKGYHLMSFPQSAP |
| | HGVVFLHVTYVPAQEKNFTTAPAICHDGKAHFPREGVFVSNG |
| | THWFVTQRNFYEPQIITTDNTFVSGNCDVVIGIVNNTVYDPLQ |
| | PELDSFKEELDKYFKNHTSPDVDLGDISGINASVVNIQKEIDRL |
| | NEVAKNLNESLIDLQELGKYEQYIKWPWYIWLGFIAGLIAIVM |
| | VTIMLCCMTSCCSCLKGCCSCGSCCKFDEDDSEPVLKGVKLH |
| | YT |
| Optimized nucleotide | (SEQ ID NO: 87) |
| sequence encoding of a | ATGTTCGTCTTCCTCGTGCTGCTCCCACTCGTTTCTTCCCAG |
| SARS-CoV-2 S protein | TGTGTCAACCTGACAACTAGGACTCAGCTGCCACCAGCCTA |
| which has been modified | CACCAACTCCTTCACCAGAGGCGTGTATTACCCAGACAAGG |
| to remove residues 985 | TGTTTAGAAGCAGCGTGCTGCACTCTACCCAGGACCTCTTT |
| with proline | CTGCCCTTTTTCAGCAACGTGACATGGTTTCACGCAATTCA |
| | CGTGTCCGGCACTAATGGCACAAAGCGGTTCGACAATCCA |
| | GTCCTGCCTTTCAACGATGGCGTCTACTTTGCATCTACTGA |
| | GAAATCCAATATCATTAGGGGATGGATCTTCGGCACAACCC |
| | TGGATTCTAAGACCCAGAGCCTGCTGATCGTCAACAACGCC |
| | ACAAACGTGGTCATTAAGGTTTGCGAGTTTCAGTTCTGTAA |
| | CGATCCTTTTCTGGGCGTGTATTATCATAAGAACAATAAGA |
| | GCTGGATGGAGTCCGAGTTTAGAGTGTATAGCTCTGCAAAT |
| | AATTGTACCTTTGAGTACGTGAGCCAGCCCTTTCTGATGGA |
| | CCTGGAGGGAAAACAAGGAAACTTCAAAAACCTGCGGGAA |
| | TTCGTTTTCAAAAACATCGACGGCTATTTCAAGATCTATAG |
| | CAAGCATACCCCAATCAACCTCGTGAGGGACCTCCCCCAG |
| | GGCTTTAGCGCACTGGAGCCACTGGTTGACCTGCCTATCGG |
| | CATTAATATCACAAGATTTCAGACCCTGCTGGCACTGCATA |
| | GAAGCTATCTGACCCCTGGAGACTCCTCTAGTGGGTGGACT |
| | GCCGGCGCCGCTGCCTACTATGTGGGCTATCTGCAGCCACG |
| | GACATTCCTGCTGAAATACAATGAGAACGGGACAATCACA |
| | GATGCTGTTGATTGCGCACTCGACCCCCTGTCCGAGACAAA |
| | GTGCACTCTCAAGAGCTTTACCGTCGAGAAGGGCATCTATC |
| | AGACCTCAAACTTCAGGGTGCAGCCCACAGAATCTATCGTG |
| | CGCTTCCCTAATATCACTAACCTGTGTCCTTTCGGTGAAGT |
| | GTTCAACGCCACCAGGTTTGCTAGCGTGTATGCCTGGAACA |
| | GGAAGAGGATCTCTAACTGCGTCGCCGACTATTCCGTGCTG |
| | TATAACAGCGCCTCCTTCTCCACATTCAAATGCTATGGAGT |
| | GAGCCCGACAAAACTGAACGATCTCTGCTTTACAAATGTCT |
| | ACGCCGACTCTTTTGTGATCAGAGGGGACGAGGTCCGGCA |
| | GATCGCACCAGGACAGACAGGCAAGATTGCTGACTACAAC |
| | TATAAGCTGCCTGACGACTTCACAGGATGTGTGATCGCATG |
| | GAACTCAAACAATCTGGACTCCAAAGTCGGGGGCAACTAT |
| | AATTACCTGTATCGCCTGTTCCGGAAGTCCAACCTGAAGCC |
| | CTTCGAGAGGGACATCAGTACAGAGATCTATCAGGCTGGC |
| | TCCACCCCTTGCAATGGCGTCGAAGGCTTTAATTGTTATTTT |
| | CCCCTGCAGTCTTACGGGTTTCAGCCTACTAATGGAGTTGG |
| | GTACCAGCCATACAGAGTGGTCGTGCTCAGCTTCGAGCTCC |
| | TGCATGCTCCAGCTACAGTTTGCGGGCCAAAGAAGTCCACT |
| | AACCTGGTGAAGAATAAGTGCGTCAACTTCAACTTTAACGG |
| | GCTCACCGGCACCGGCGTGCTGACTGAGAGCAACAAGAAG |
| | TTTCTGCCATTTCAACAGTTTGGACGGGACATTGCCGACAC |
| | CACCGATGCCGTTCGGGATCCACAGACCCTGGAAATTCTGG |
| | ACATTACACCGTGCAGCTTCGGGGGCGTGAGCGTGATCAC |
| | ACCCGGAACCAATACAAGCAACCAGGTTGCCGTCCTGTATC |
| | AGGATGTCAATTGCACAGAAGTGCCAGTTGCTATCCACGCA |
| | GACCAGCTGACTCCCACATGGCGGGTGTATAGCACCGGAT |
| | CCAACGTGTTTCAGACCCGCGCCGGATGTCTCATTGGGGCC |
| | GAGCACGTGAATAACAGCTACGAGTGCGACATCCCCATTG |
| | GCGCCGGCATTTGTGCGTCTTACCAGACTCAGACCAACTCT |
| | CCTAGAAGGGCCAGGTCCGTTGCTAGTCAGTCTATTATTGC |
| | CTATACCATGAGCCTCGGAGCTGAGAATAGCGTGGCCTACT |
| | CCAATAATTCCATCGCAATCCCTACTAACTTCACTATTTCTG |
| | TGACCACCGAGATCCTGCCTGTGTCTATGACTAAGACTAGC |
| | GTTGATTGTACCATGTATATTTGTGGCGACTCTACCGAATG |
| | TTCTAACCTGCTGCTTCAGTACGGCTCATTTTGCACACAGCT |
| | GAACAGAGCCCTGACTGGGATCGCTGTGGAGCAGGACAAG |
| | AACACACAGGAGGTGTTTGCACAGGTGAAGCAGATCTATA |
| | AGACCCCTCCTATTAAGGATTTCGGCGGATTCAATTTCTCA |
| | CAGATTCTGCCAGACCCCAGTAAGCCTTCCAAGAGGAGCTT |
| | CATCGAGGATCTCCTGTTTAACAAGGTGACCCTGGCAGACG |
| | CCGGCTTTATTAAGCAATATGGGGATTGCCTGGGCGACATT |
| | GCTGCCAGAGACCTGATTTGCGCCCAGAAATTCAATGGCCT |
| | CACAGTGCTGCCACCTCTGCTGACCGACGAGATGATCGCTC |
| | AATACACTAGCGCACTGCTGGCCGGAACCATCACATCAGG |
| | CTGGACCTTCGGGGCCGGAGCAGCACTGCAGATTCCATTCG |
| | CCATGCAGATGGCCTATAGATTCAACGGCATTGGCGTCACA |
| | CAGAACGTGCTGTACGAAAACCAGAAGCTCATCGCTAACC |
| | AGTTTAATTCCGCAATTGGAAAGATCCAAGATTCACTCAGC |
| | TCAACCGCCTCTGCACTCGGAAAGCTGCAGGACGTGGTCA |
| | ACCAGAATGCTCAGGCCCTGAACACACTCGTCAAGCAGCT |
| | GTCCTCTAACTTTGGCGCTATCAGCTCCGTTCTGAACGACA |
| | TTCTGAGCCGCCTGCCCAAGGTGGAGGCTGAAGTCCAGATT |
| | GACCGCCTGATTACCGGCCGGCTGCAGTCTCTGCAAACATA |
| | CGTGACCCAGCAGCTGATCAGAGCAGCCGAGATCCGGGCA |
| | TCCGCAAATCTGGCAGCAACTAAGATGAGCGAATGCGTGC |
| | TGGGCCAGTCCAAGCGGGTGGACTTTTGTGGCAAGGGCTA |
| | CCACCTGATGAGCTTCCCCCAGAGCGCCCCACATGGCGTTG |
| | TTTTTCTGCACGTGACCTATGTCCCTGCTCAGGAAAAGAAC |
| | TTTACAACTGCTCCTGCTATCTGCCATGACGGCAAGGCCCA |
| | CTTCCCACGGGAGGGAGTGTTTGTGTCCAATGGCACACACT |
| | GGTTCGTGACCCAGAGGAACTTCTATGAACCCCAGATCATC |
| | ACCACTGACAATACCTTCGTGTCTGGAAATTGCGACGTCGT |
| | GATCGGCATCGTTAACAACACCGTGTACGACCCTCTCCAGC |
| | CAGAGCTGGACTCCTTTAAGGAGGAACTGGATAAGTATTTT |
| | AAGAACCACACAAGCCCAGATGTGGATCTCGGGGACATCT |
| | CCGGAATTAACGCCTCCGTGGTGAATATCCAGAAGGAGAT |
| | TGACCGCCTAAATGAAGTTGCCAAGAACCTCAATGAGTCTC |
| | TGATTGATCTGCAGGAACTGGGCAAGTATGAGCAGTATATC |
| | AAATGGCCCTGGTACATTTGGCTGGGGTTTATCGCCGGACT |
| | GATTGCCATCGTCATGGTGACCATCATGCTGTGTTGCATGA |
| | CCTCCTGTTGTTCCTGTCTGAAGGGCTGCTGTAGTTGCGGCT |
| | CTTGCTGTAAATTCGACGAAGATGATAGCGAGCCCGTGCTG |
| | AAGGGCGTGAAGCTGCATTATACCTGA |
| A SARS-CoV-2 S | (SEQ ID NO: 88) |
| protein which has been | MFVFLVLLPLVSSQCVNLTTRTQLPPAYTNSFTRGVYYPDKVF |
| modified to remove | RSSVLHSTQDLFLPFFSNVTWFHAIHVSGTNGTKRFDNPVLPF |
| residues 985 with | NDGVYFASTEKSNIIRGWIFGTTLDSKTQSLLIVNNATNVVIKV |
| proline | CEFQFCNDPFLGVYYHKNNKSWMESEFRVYSSANNCTFEYVS |
| | QPFLMDLEGKQGNFKNLREFVFKNIDGYFKIYSKHTPINLVRD |
| | LPQGFSALEPLVDLPIGINITRFQTLLALHRSYLTPGDSSSGWT |
| | AGAAAYYVGYLQPRTFLLKYNENGTITDAVDCALDPLSETKC |
| | TLKSFTVEKGIYQTSNFRVQPTESIVRFPNITNLCPFGEVFNATR |
| | FASVYAWNRKRISNCVADYSVLYNSASFSTFKCYGVSPTKLN |
| | DLCFTNVYADSFVIRGDEVRQIAPGQTGKIADYNYKLPDDFTG |
| | CVIAWNSNNLDSKVGGNYNYLYRLFRKSNLKPFERDISTEIYQ |
| | AGSTPCNGVEGFNCYFPLQSYGFQPTNGVGYQPYRVVVLSFE |
| | LLHAPATVCGPKKSTNLVKNKCVNFNFNGLTGTGVLTESNKK |
| | FLPFQQFGRDIADTTDAVRDPQTLEILDITPCSFGGVSVITPGTN |
| | TSNQVAVLYQDVNCTEVPVAIHADQLTPTWRVYSTGSNVFQT |
| | RAGCLIGAEHVNNSYECDIPIGAGICASYQTQTNSPRRARSVA |
| | SQSIIAYTMSLGAENSVAYSNNSIAIPTNFTISVTTEILPVSMTK |
| | TSVDCTMYICGDSTECSNLLLQYGSFCTQLNRALTGIAVEQDK |
| | NTQEVFAQVKQIYKTPPIKDFGGFNFSQILPDPSKPSKRSFIEDL |
| | LFNKVTLADAGFIKQYGDCLGDIAARDLICAQKFNGLTVLPPL |
| | LTDEMIAQYTSALLAGTITSGWTFGAGAALQIPFAMQMAYRF |
| | NGIGVTQNVLYENQKLIANQFNSAIGKIQDSLSSTASALGKLQ |
| | DVVNQNAQALNTLVKQLSSNFGAISSVLNDILSRLPKVEAEV |
| | QIDRLITGRLQSLQTYVTQQLIRAAEIRASANLAATKMSECVL |
| | GQSKRVDFCGKGYHLMSFPQSAPHGVVFLHVTYVPAQEKNF |
| | TTAPAICHDGKAHFPREGVFVSNGTHWFVTQRNFYEPQIITTD |
| | NTFVSGNCDVVIGIVNNTVYDPLQPELDSFKEELDKYFKNHTS |
| | PDVDLGDISGINASVVNIQKEIDRLNEVAKNLNESLIDLQELGK |
| | YEQYIKWPWYIWLGFIAGLIAIVMVTIMLCCMTSCCSCLKGCC |
| | SCGSCCKFDEDDSEPVLKGVKLHYT |
| Optimized nucleotide | (SEQ ID NO: 89) |
| sequence encoding a | ATGTTCGTCTTCCTCGTGCTGCTCCCACTCGTTTCTTCCCAG |
| SARS-CoV-2 S protein | TGTGTCAACCTGACAACTAGGACTCAGCTGCCACCAGCCTA |
| which has been modified | CACCAACTCCTTCACCAGAGGCGTGTATTACCCAGACAAGG |
| to remove a furin | TGTTTAGAAGCAGCGTGCTGCACTCTACCCAGGACCTCTTT |
| cleavage site and to | CTGCCCTTTTTCAGCAACGTGACATGGTTTCACGCAATTCA |
| replace residues 985 | CGTGTCCGGCACTAATGGCACAAAGCGGTTCGACAATCCA |
| with proline | GTCCTGCCTTTCAACGATGGCGTCTACTTTGCATCTACTGA |
| | GAAATCCAATATCATTAGGGGATGGATCTTCGGCACAACCC |
| | TGGATTCTAAGACCCAGAGCCTGCTGATCGTCAACAACGCC |
| | ACAAACGTGGTCATTAAGGTTTGCGAGTTTCAGTTCTGTAA |
| | CGATCCTTTTCTGGGCGTGTATTATCATAAGAACAATAAGA |
| | GCTGGATGGAGTCCGAGTTTAGAGTGTATAGCTCTGCAAAT |
| | AATTGTACCTTTGAGTACGTGAGCCAGCCCTTTCTGATGGA |
| | CCTGGAGGGAAAACAAGGAAACTTCAAAAACCTGCGGGAA |
| | TTCGTTTTCAAAAACATCGACGGCTATTTCAAGATCTATAG |
| | CAAGCATACCCCAATCAACCTCGTGAGGGACCTCCCCCAG |
| | GGCTTTAGCGCACTGGAGCCACTGGTTGACCTGCCTATCGG |
| | CATTAATATCACAAGATTTCAGACCCTGCTGGCACTGCATA |
| | GAAGCTATCTGACCCCTGGAGACTCCTCTAGTGGGTGGACT |
| | GCCGGCGCCGCTGCCTACTATGTGGGCTATCTGCAGCCACG |
| | GACATTCCTGCTGAAATACAATGAGAACGGGACAATCACA |
| | GATGCTGTTGATTGCGCACTCGACCCCCTGTCCGAGACAAA |
| | GTGCACTCTCAAGAGCTTTACCGTCGAGAAGGGCATCTATC |
| | AGACCTCAAACTTCAGGGTGCAGCCCACAGAATCTATCGTG |
| | CGCTTCCCTAATATCACTAACCTGTGTCCTTTCGGTGAAGT |
| | GTTCAACGCCACCAGGTTTGCTAGCGTGTATGCCTGGAACA |
| | GGAAGAGGATCTCTAACTGCGTCGCCGACTATTCCGTGCTG |
| | TATAACAGCGCCTCCTTCTCCACATTCAAATGCTATGGAGT |
| | GAGCCCGACAAAACTGAACGATCTCTGCTTTACAAATGTCT |
| | ACGCCGACTCTTTTGTGATCAGAGGGGACGAGGTCCGGCA |
| | GATCGCACCAGGACAGACAGGCAAGATTGCTGACTACAAC |
| | TATAAGCTGCCTGACGACTTCACAGGATGTGTGATCGCATG |
| | GAACTCAAACAATCTGGACTCCAAAGTCGGGGGCAACTAT |
| | AATTACCTGTATCGCCTGTTCCGGAAGTCCAACCTGAAGCC |
| | CTTCGAGAGGGACATCAGTACAGAGATCTATCAGGCTGGC |
| | TCCACCCCTTGCAATGGCGTCGAAGGCTTTAATTGTTATTTT |
| | CCCCTGCAGTCTTACGGGTTTCAGCCTACTAATGGAGTTGG |
| | GTACCAGCCATACAGAGTGGTCGTGCTCAGCTTCGAGCTCC |
| | TGCATGCTCCAGCTACAGTTTGCGGGCCAAAGAAGTCCACT |
| | AACCTGGTGAAGAATAAGTGCGTCAACTTCAACTTTAACGG |
| | GCTCACCGGCACCGGCGTGCTGACTGAGAGCAACAAGAAG |
| | TTTCTGCCATTTCAACAGTTTGGACGGGACATTGCCGACAC |
| | CACCGATGCCGTTCGGGATCCACAGACCCTGGAAATTCTGG |
| | ACATTACACCGTGCAGCTTCGGGGGCGTGAGCGTGATCAC |
| | ACCCGGAACCAATACAAGCAACCAGGTTGCCGTCCTGTATC |
| | AGGATGTCAATTGCACAGAAGTGCCAGTTGCTATCCACGCA |
| | GACCAGCTGACTCCCACATGGCGGGTGTATAGCACCGGAT |
| | CCAACGTGTTTCAGACCCGCGCCGGATGTCTCATTGGGGCC |
| | GAGCACGTGAATAACAGCTACGAGTGCGACATCCCCATTG |
| | GCGCCGGCATTTGTGCGTCTTACCAGACTCAGACCAACTCT |
| | CCTGGCTCCGCCTCTTCCGTTGCTAGTCAGTCTATTATTGCC |
| | TATACCATGAGCCTCGGAGCTGAGAATAGCGTGGCCTACTC |
| | CAATAATTCCATCGCAATCCCTACTAACTTCACTATTTCTGT |
| | GACCACCGAGATCCTGCCTGTGTCTATGACTAAGACTAGCG |
| | TTGATTGTACCATGTATATTTGTGGCGACTCTACCGAATGTT |
| | CTAACCTGCTGCTTCAGTACGGCTCATTTTGCACACAGCTG |
| | AACAGAGCCCTGACTGGGATCGCTGTGGAGCAGGACAAGA |
| | ACACACAGGAGGTGTTTGCACAGGTGAAGCAGATCTATAA |
| | GACCCCTCCTATTAAGGATTTCGGCGGATTCAATTTCTCAC |
| | AGATTCTGCCAGACCCCAGTAAGCCTTCCAAGAGGAGCTTC |
| | ATCGAGGATCTCCTGTTTAACAAGGTGACCCTGGCAGACGC |
| | CGGCTTTATTAAGCAATATGGGGATTGCCTGGGCGACATTG |
| | CTGCCAGAGACCTGATTTGCGCCCAGAAATTCAATGGCCTC |
| | ACAGTGCTGCCACCTCTGCTGACCGACGAGATGATCGCTCA |
| | ATACACTAGCGCACTGCTGGCCGGAACCATCACATCAGGCT |
| | GGACCTTCGGGGCCGGAGCAGCACTGCAGATTCCATTCGCC |
| | ATGCAGATGGCCTATAGATTCAACGGCATTGGCGTCACACA |
| | GAACGTGCTGTACGAAAACCAGAAGCTCATCGCTAACCAG |
| | TTTAATTCCGCAATTGGAAAGATCCAAGATTCACTCAGCTC |
| | AACCGCCTCTGCACTCGGAAAGCTGCAGGACGTGGTCAAC |
| | CAGAATGCTCAGGCCCTGAACACACTCGTCAAGCAGCTGTC |
| | CTCTAACTTTGGCGCTATCAGCTCCGTTCTGAACGACATTCT |
| | GAGCCGCCTGCCCAAGGTGGAGGCTGAAGTCCAGATTGAC |
| | CGCCTGATTACCGGCCGGCTGCAGTCTCTGCAAACATACGT |
| | GACCCAGCAGCTGATCAGAGCAGCCGAGATCCGGGCATCC |
| | GCAAATCTGGCAGCAACTAAGATGAGCGAATGCGTGCTGG |
| | GCCAGTCCAAGCGGGTGGACTTTTGTGGCAAGGGCTACCA |
| | CCTGATGAGCTTCCCCCAGAGCGCCCCACATGGCGTTGTTT |
| | TTCTGCACGTGACCTATGTCCCTGCTCAGGAAAAGAACTTT |
| | ACAACTGCTCCTGCTATCTGCCATGACGGCAAGGCCCACTT |
| | CCCACGGGAGGGAGTGTTTGTGTCCAATGGCACACACTGGT |
| | TCGTGACCCAGAGGAACTTCTATGAACCCCAGATCATCACC |
| | ACTGACAATACCTTCGTGTCTGGAAATTGCGACGTCGTGAT |
| | CGGCATCGTTAACAACACCGTGTACGACCCTCTCCAGCCAG |
| | AGCTGGACTCCTTTAAGGAGGAACTGGATAAGTATTTTAAG |
| | AACCACACAAGCCCAGATGTGGATCTCGGGGACATCTCCG |
| | GAATTAACGCCTCCGTGGTGAATATCCAGAAGGAGATTGA |
| | CCGCCTAAATGAAGTTGCCAAGAACCTCAATGAGTCTCTGA |
| | TTGATCTGCAGGAACTGGGCAAGTATGAGCAGTATATCAA |
| | ATGGCCCTGGTACATTTGGCTGGGGTTTATCGCCGGACTGA |
| | TTGCCATCGTCATGGTGACCATCATGCTGTGTTGCATGACC |
| | TCCTGTTGTTCCTGTCTGAAGGGCTGCTGTAGTTGCGGCTCT |
| | TGCTGTAAATTCGACGAAGATGATAGCGAGCCCGTGCTGA |
| | AGGGCGTGAAGCTGCATTATACCTGA |
| A SARS-CoV-2 S | (SEQ ID NO: 90) |
| protein which has been | MFVFLVLLPLVSSQCVNLTTRTQLPPAYTNSFTRGVYYPDKVF |
| modified to remove a | RSSVLHSTQDLFLPFFSNVTWFHAIHVSGTNGTKRFDNPVLPF |
| furin cleavage site and | NDGVYFASTEKSNIIRGWIFGTTLDSKTQSLLIVNNATNVVIKV |
| to replace residues 985 | CEFQFCNDPFLGVYYHKNNKSWMESEFRVYSSANNCTFEYVS |
| with proline | QPFLMDLEGKQGNFKNLREFVFKNIDGYFKIYSKHTPINLVRD |
| | LPQGFSALEPLVDLPIGINITRFQTLLALHRSYLTPGDSSSGWT |
| | AGAAAYYVGYLQPRTFLLKYNENGTITDAVDCALDPLSETKC |
| | TLKSFTVEKGIYQTSNFRVQPTESIVRFPNITNLCPFGEVFNATR |
| | FASVYAWNRKRISNCVADYSVLYNSASFSTFKCYGVSPTKLN |
| | DLCFTNVYADSFVIRGDEVRQIAPGQTGKIADYNYKLPDDFTG |
| | CVIAWNSNNLDSKVGGNYNYLYRLFRKSNLKPFERDISTEIYQ |
| | AGSTPCNGVEGFNCYFPLQSYGFQPTNGVGYQPYRVVVLSFE |
| | LLHAPATVCGPKKSTNLVKNKCVNFNFNGLTGTGVLTESNKK |
| | FLPFQQFGRDIADTTDAVRDPQTLEILDITPCSFGGVSVITPGTN |
| | TSNQVAVLYQDVNCTEVPVAIHADQLTPTWRVYSTGSNVFQT |
| | RAGCLIGAEHVNNSYECDIPIGAGICASYQTQTNSPGSASSVAS |
| | QSIIAYTMSLGAENSVAYSNNSIAIPTNFTISVTTEILPVSMTKT |
| | SVDCTMYICGDSTECSNLLLQYGSFCTQLNRALTGIAVEQDK |
| | NTQEVFAQVKQIYKTPPIKDFGGFNFSQILPDPSKPSKRSFIEDL |
| | LFNKVTLADAGFIKQYGDCLGDIAARDLICAQKFNGLTVLPPL |
| | LTDEMIAQYTSALLAGTITSGWTFGAGAALQIPFAMQMAYRF |
| | NGIGVTQNVLYENQKLIANQFNSAIGKIQDSLSSTASALGKLQ |
| | DVVNQNAQALNTLVKQLSSNFGAISSVLNDILSRLPKVEAEV |
| | QIDRLITGRLQSLQTYVTQQLIRAAEIRASANLAATKMSECVL |
| | GQSKRVDFCGKGYHLMSFPQSAPHGVVFLHVTYVPAQEKNF |
| | TTAPAICHDGKAHFPREGVFVSNGTHWFVTQRNFYEPQIITTD |
| | NTFVSGNCDVVIGIVNNTVYDPLQPELDSFKEELDKYFKNHTS |
| | PDVDLGDISGINASVVNIQKEIDRLNEVAKNLNESLIDLQELGK |
| | YEQYIKWPWYIWLGFIAGLIAIVMVTIMLCCMTSCCSCLKGCC |
| | SCGSCCKFDEDDSEPVLKGVKLHYT |
| Optimized nucleotide | (SEQ ID NO: 91) |
| sequence encoding a | ATGTTCGTCTTCCTCGTGCTGCTCCCACTCGTTTCTTCCCAG |
| SARS-CoV-2 S protein | TGTGTCAACCTGACAACTAGGACTCAGCTGCCACCAGCCTA |
| which has been modified | CACCAACTCCTTCACCAGAGGCGTGTATTACCCAGACAAGG |
| to replace residues 985, | TGTTTAGAAGCAGCGTGCTGCACTCTACCCAGGACCTCTTT |
| 986 and 987 with proline | CTGCCCTTTTTCAGCAACGTGACATGGTTTCACGCAATTCA |
| | CGTGTCCGGCACTAATGGCACAAAGCGGTTCGACAATCCA |
| | GTCCTGCCTTTCAACGATGGCGTCTACTTTGCATCTACTGA |
| | GAAATCCAATATCATTAGGGGATGGATCTTCGGCACAACCC |
| | TGGATTCTAAGACCCAGAGCCTGCTGATCGTCAACAACGCC |
| | ACAAACGTGGTCATTAAGGTTTGCGAGTTTCAGTTCTGTAA |
| | CGATCCTTTTCTGGGCGTGTATTATCATAAGAACAATAAGA |
| | GCTGGATGGAGTCCGAGTTTAGAGTGTATAGCTCTGCAAAT |
| | AATTGTACCTTTGAGTACGTGAGCCAGCCCTTTCTGATGGA |
| | CCTGGAGGGAAAACAAGGAAACTTCAAAAACCTGCGGGAA |
| | TTCGTTTTCAAAAACATCGACGGCTATTTCAAGATCTATAG |
| | CAAGCATACCCCAATCAACCTCGTGAGGGACCTCCCCCAG |
| | GGCTTTAGCGCACTGGAGCCACTGGTTGACCTGCCTATCGG |
| | CATTAATATCACAAGATTTCAGACCCTGCTGGCACTGCATA |
| | GAAGCTATCTGACCCCTGGAGACTCCTCTAGTGGGTGGACT |
| | GCCGGCGCCGCTGCCTACTATGTGGGCTATCTGCAGCCACG |
| | GACATTCCTGCTGAAATACAATGAGAACGGGACAATCACA |
| | GATGCTGTTGATTGCGCACTCGACCCCCTGTCCGAGACAAA |
| | GTGCACTCTCAAGAGCTTTACCGTCGAGAAGGGCATCTATC |
| | AGACCTCAAACTTCAGGGTGCAGCCCACAGAATCTATCGTG |
| | CGCTTCCCTAATATCACTAACCTGTGTCCTTTCGGTGAAGT |
| | GTTCAACGCCACCAGGTTTGCTAGCGTGTATGCCTGGAACA |
| | GGAAGAGGATCTCTAACTGCGTCGCCGACTATTCCGTGCTG |
| | TATAACAGCGCCTCCTTCTCCACATTCAAATGCTATGGAGT |
| | GAGCCCGACAAAACTGAACGATCTCTGCTTTACAAATGTCT |
| | ACGCCGACTCTTTTGTGATCAGAGGGGACGAGGTCCGGCA |
| | GATCGCACCAGGACAGACAGGCAAGATTGCTGACTACAAC |
| | TATAAGCTGCCTGACGACTTCACAGGATGTGTGATCGCATG |
| | GAACTCAAACAATCTGGACTCCAAAGTCGGGGGCAACTAT |
| | AATTACCTGTATCGCCTGTTCCGGAAGTCCAACCTGAAGCC |
| | CTTCGAGAGGGACATCAGTACAGAGATCTATCAGGCTGGC |
| | TCCACCCCTTGCAATGGCGTCGAAGGCTTTAATTGTTATTTT |
| | CCCCTGCAGTCTTACGGGTTTCAGCCTACTAATGGAGTTGG |
| | GTACCAGCCATACAGAGTGGTCGTGCTCAGCTTCGAGCTCC |
| | TGCATGCTCCAGCTACAGTTTGCGGGCCAAAGAAGTCCACT |
| | AACCTGGTGAAGAATAAGTGCGTCAACTTCAACTTTAACGG |
| | GCTCACCGGCACCGGCGTGCTGACTGAGAGCAACAAGAAG |
| | TTTCTGCCATTTCAACAGTTTGGACGGGACATTGCCGACAC |
| | CACCGATGCCGTTCGGGATCCACAGACCCTGGAAATTCTGG |
| | ACATTACACCGTGCAGCTTCGGGGGCGTGAGCGTGATCAC |
| | ACCCGGAACCAATACAAGCAACCAGGTTGCCGTCCTGTATC |
| | AGGATGTCAATTGCACAGAAGTGCCAGTTGCTATCCACGCA |
| | GACCAGCTGACTCCCACATGGCGGGTGTATAGCACCGGAT |
| | CCAACGTGTTTCAGACCCGCGCCGGATGTCTCATTGGGGCC |
| | GAGCACGTGAATAACAGCTACGAGTGCGACATCCCCATTG |
| | GCGCCGGCATTTGTGCGTCTTACCAGACTCAGACCAACTCT |
| | CCTAGAAGGGCCAGGTCCGTTGCTAGTCAGTCTATTATTGC |
| | CTATACCATGAGCCTCGGAGCTGAGAATAGCGTGGCCTACT |
| | CCAATAATTCCATCGCAATCCCTACTAACTTCACTATTTCTG |
| | TGACCACCGAGATCCTGCCTGTGTCTATGACTAAGACTAGC |
| | GTTGATTGTACCATGTATATTTGTGGCGACTCTACCGAATG |
| | TTCTAACCTGCTGCTTCAGTACGGCTCATTTTGCACACAGCT |
| | GAACAGAGCCCTGACTGGGATCGCTGTGGAGCAGGACAAG |
| | AACACACAGGAGGTGTTTGCACAGGTGAAGCAGATCTATA |
| | AGACCCCTCCTATTAAGGATTTCGGCGGATTCAATTTCTCA |
| | CAGATTCTGCCAGACCCCAGTAAGCCTTCCAAGAGGAGCTT |
| | CATCGAGGATCTCCTGTTTAACAAGGTGACCCTGGCAGACG |
| | CCGGCTTTATTAAGCAATATGGGGATTGCCTGGGCGACATT |
| | GCTGCCAGAGACCTGATTTGCGCCCAGAAATTCAATGGCCT |
| | CACAGTGCTGCCACCTCTGCTGACCGACGAGATGATCGCTC |
| | AATACACTAGCGCACTGCTGGCCGGAACCATCACATCAGG |
| | CTGGACCTTCGGGGCCGGAGCAGCACTGCAGATTCCATTCG |
| | CCATGCAGATGGCCTATAGATTCAACGGCATTGGCGTCACA |
| | CAGAACGTGCTGTACGAAAACCAGAAGCTCATCGCTAACC |
| | AGTTTAATTCCGCAATTGGAAAGATCCAAGATTCACTCAGC |
| | TCAACCGCCTCTGCACTCGGAAAGCTGCAGGACGTGGTCA |
| | ACCAGAATGCTCAGGCCCTGAACACACTCGTCAAGCAGCT |
| | GTCCTCTAACTTTGGCGCTATCAGCTCCGTTCTGAACGACA |
| | TTCTGAGCCGCCTGCCTCCACCCGAGGCTGAAGTCCAGATT |
| | GACCGCCTGATTACCGGCCGGCTGCAGTCTCTGCAAACATA |
| | CGTGACCCAGCAGCTGATCAGAGCAGCCGAGATCCGGGCA |
| | TCCGCAAATCTGGCAGCAACTAAGATGAGCGAATGCGTGC |
| | TGGGCCAGTCCAAGCGGGTGGACTTTTGTGGCAAGGGCTA |
| | CCACCTGATGAGCTTCCCCCAGAGCGCCCCACATGGCGTTG |
| | TTTTTCTGCACGTGACCTATGTCCCTGCTCAGGAAAAGAAC |
| | TTTACAACTGCTCCTGCTATCTGCCATGACGGCAAGGCCCA |
| | CTTCCCACGGGAGGGAGTGTTTGTGTCCAATGGCACACACT |
| | GGTTCGTGACCCAGAGGAACTTCTATGAACCCCAGATCATC |
| | ACCACTGACAATACCTTCGTGTCTGGAAATTGCGACGTCGT |
| | GATCGGCATCGTTAACAACACCGTGTACGACCCTCTCCAGC |
| | CAGAGCTGGACTCCTTTAAGGAGGAACTGGATAAGTATTTT |
| | AAGAACCACACAAGCCCAGATGTGGATCTCGGGGACATCT |
| | CCGGAATTAACGCCTCCGTGGTGAATATCCAGAAGGAGAT |
| | TGACCGCCTAAATGAAGTTGCCAAGAACCTCAATGAGTCTC |
| | TGATTGATCTGCAGGAACTGGGCAAGTATGAGCAGTATATC |
| | AAATGGCCCTGGTACATTTGGCTGGGGTTTATCGCCGGACT |
| | GATTGCCATCGTCATGGTGACCATCATGCTGTGTTGCATGA |
| | CCTCCTGTTGTTCCTGTCTGAAGGGCTGCTGTAGTTGCGGCT |
| | CTTGCTGTAAATTCGACGAAGATGATAGCGAGCCCGTGCTG |
| | AAGGGCGTGAAGCTGCATTATACCTGA |
| A SARS-CoV-2 S | (SEQ ID NO: 92) |
| protein which has been | MFVFLVLLPLVSSQCVNLTTRTQLPPAYTNSFTRGVYYPDKVF |
| modified to replace | RSSVLHSTQDLFLPFFSNVTWFHAIHVSGTNGTKRFDNPVLPF |
| residues 985, 986 and | NDGVYFASTEKSNIIRGWIFGTTLDSKTQSLLIVNNATNVVIKV |
| 987 with proline | CEFQFCNDPFLGVYYHKNNKSWMESEFRVYSSANNCTFEYVS |
| | QPFLMDLEGKQGNFKNLREFVFKNIDGYFKIYSKHTPINLVRD |
| | LPQGFSALEPLVDLPIGINITRFQTLLALHRSYLTPGDSSSGWT |
| | AGAAAYYVGYLQPRTFLLKYNENGTITDAVDCALDPLSETKC |
| | TLKSFTVEKGIYQTSNFRVQPTESIVRFPNITNLCPFGEVFNATR |
| | FASVYAWNRKRISNCVADYSVLYNSASFSTFKCYGVSPTKLN |
| | DLCFTNVYADSFVIRGDEVRQIAPGQTGKIADYNYKLPDDFTG |
| | CVIAWNSNNLDSKVGGNYNYLYRLFRKSNLKPFERDISTEIYQ |
| | AGSTPCNGVEGFNCYFPLQSYGFQPTNGVGYQPYRVVVLSFE |
| | LLHAPATVCGPKKSTNLVKNKCVNFNFNGLTGTGVLTESNKK |
| | FLPFQQFGRDIADTTDAVRDPQTLEILDITPCSFGGVSVITPGTN |
| | TSNQVAVLYQDVNCTEVPVAIHADQLTPTWRVYSTGSNVFQT |
| | RAGCLIGAEHVNNSYECDIPIGAGICASYQTQTNSPRRARSVA |
| | SQSIIAYTMSLGAENSVAYSNNSIAIPTNFTISVTTEILPVSMTK |
| | TSVDCTMYICGDSTECSNLLLQYGSFCTQLNRALTGIAVEQDK |
| | NTQEVFAQVKQIYKTPPIKDFGGFNFSQILPDPSKPSKRSFIEDL |
| | LFNKVTLADAGFIKQYGDCLGDIAARDLICAQKFNGLTVLPPL |
| | LTDEMIAQYTSALLAGTITSGWTFGAGAALQIPFAMQMAYRF |
| | NGIGVTQNVLYENQKLIANQFNSAIGKIQDSLSSTASALGKLQ |
| | DVVNQNAQALNTLVKQLSSNFGAISSVLNDILSRLPPPEAEVQ |
| | IDRLITGRLQSLQTYVTQQLIRAAEIRASANLAATKMSECVLG |
| | QSKRVDFCGKGYHLMSFPQSAPHGVVFLHVTYVPAQEKNFTT |
| | APAICHDGKAHFPREGVFVSNGTHWFVTQRNFYEPQIITTDNT |
| | FVSGNCDVVIGIVNNTVYDPLQPELDSFKEELDKYFKNHTSPD |
| | VDLGDISGINASVVNIQKEIDRLNEVAKNLNESLIDLQELGKYE |
| | QYIKWPWYIWLGFIAGLIAIVMVTIMLCCMTSCCSCLKGCCSC |
| | GSCCKFDEDDSEPVLKGVKLHYT |
| Optimized nucleotide | (SEQ ID NO: 93) |
| encoding a SARS-CoV-2 | ATGTTCGTCTTCCTCGTGCTGCTCCCACTCGTTTCTTCCCAG |
| S protein sequence | TGTGTCAACCTGACAACTAGGACTCAGCTGCCACCAGCCTA |
| which has been modified | CACCAACTCCTTCACCAGAGGCGTGTATTACCCAGACAAGG |
| to remove a furin | TGTTTAGAAGCAGCGTGCTGCACTCTACCCAGGACCTCTTT |
| cleavage site and to | CTGCCCTTTTTCAGCAACGTGACATGGTTTCACGCAATTCA |
| replace residues 985, | CGTGTCCGGCACTAATGGCACAAAGCGGTTCGACAATCCA |
| 986 and 987 with proline | GTCCTGCCTTTCAACGATGGCGTCTACTTTGCATCTACTGA |
| | GAAATCCAATATCATTAGGGGATGGATCTTCGGCACAACCC |
| | TGGATTCTAAGACCCAGAGCCTGCTGATCGTCAACAACGCC |
| | ACAAACGTGGTCATTAAGGTTTGCGAGTTTCAGTTCTGTAA |
| | CGATCCTTTTCTGGGCGTGTATTATCATAAGAACAATAAGA |
| | GCTGGATGGAGTCCGAGTTTAGAGTGTATAGCTCTGCAAAT |
| | AATTGTACCTTTGAGTACGTGAGCCAGCCCTTTCTGATGGA |
| | CCTGGAGGGAAAACAAGGAAACTTCAAAAACCTGCGGGAA |
| | TTCGTTTTCAAAAACATCGACGGCTATTTCAAGATCTATAG |
| | CAAGCATACCCCAATCAACCTCGTGAGGGACCTCCCCCAG |
| | GGCTTTAGCGCACTGGAGCCACTGGTTGACCTGCCTATCGG |
| | CATTAATATCACAAGATTTCAGACCCTGCTGGCACTGCATA |
| | GAAGCTATCTGACCCCTGGAGACTCCTCTAGTGGGTGGACT |
| | GCCGGCGCCGCTGCCTACTATGTGGGCTATCTGCAGCCACG |
| | GACATTCCTGCTGAAATACAATGAGAACGGGACAATCACA |
| | GATGCTGTTGATTGCGCACTCGACCCCCTGTCCGAGACAAA |
| | GTGCACTCTCAAGAGCTTTACCGTCGAGAAGGGCATCTATC |
| | AGACCTCAAACTTCAGGGTGCAGCCCACAGAATCTATCGTG |
| | CGCTTCCCTAATATCACTAACCTGTGTCCTTTCGGTGAAGT |
| | GTTCAACGCCACCAGGTTTGCTAGCGTGTATGCCTGGAACA |
| | GGAAGAGGATCTCTAACTGCGTCGCCGACTATTCCGTGCTG |
| | TATAACAGCGCCTCCTTCTCCACATTCAAATGCTATGGAGT |
| | GAGCCCGACAAAACTGAACGATCTCTGCTTTACAAATGTCT |
| | ACGCCGACTCTTTTGTGATCAGAGGGGACGAGGTCCGGCA |
| | GATCGCACCAGGACAGACAGGCAAGATTGCTGACTACAAC |
| | TATAAGCTGCCTGACGACTTCACAGGATGTGTGATCGCATG |
| | GAACTCAAACAATCTGGACTCCAAAGTCGGGGGCAACTAT |
| | AATTACCTGTATCGCCTGTTCCGGAAGTCCAACCTGAAGCC |
| | CTTCGAGAGGGACATCAGTACAGAGATCTATCAGGCTGGC |
| | TCCACCCCTTGCAATGGCGTCGAAGGCTTTAATTGTTATTTT |
| | CCCCTGCAGTCTTACGGGTTTCAGCCTACTAATGGAGTTGG |
| | GTACCAGCCATACAGAGTGGTCGTGCTCAGCTTCGAGCTCC |
| | TGCATGCTCCAGCTACAGTTTGCGGGCCAAAGAAGTCCACT |
| | AACCTGGTGAAGAATAAGTGCGTCAACTTCAACTTTAACGG |
| | GCTCACCGGCACCGGCGTGCTGACTGAGAGCAACAAGAAG |
| | TTTCTGCCATTTCAACAGTTTGGACGGGACATTGCCGACAC |
| | CACCGATGCCGTTCGGGATCCACAGACCCTGGAAATTCTGG |
| | ACATTACACCGTGCAGCTTCGGGGGCGTGAGCGTGATCAC |
| | ACCCGGAACCAATACAAGCAACCAGGTTGCCGTCCTGTATC |
| | AGGATGTCAATTGCACAGAAGTGCCAGTTGCTATCCACGCA |
| | GACCAGCTGACTCCCACATGGCGGGTGTATAGCACCGGAT |
| | CCAACGTGTTTCAGACCCGCGCCGGATGTCTCATTGGGGCC |
| | GAGCACGTGAATAACAGCTACGAGTGCGACATCCCCATTG |
| | GCGCCGGCATTTGTGCGTCTTACCAGACTCAGACCAACTCT |
| | CCTGGCTCCGCCTCTTCCGTTGCTAGTCAGTCTATTATTGCC |
| | TATACCATGAGCCTCGGAGCTGAGAATAGCGTGGCCTACTC |
| | CAATAATTCCATCGCAATCCCTACTAACTTCACTATTTCTGT |
| | GACCACCGAGATCCTGCCTGTGTCTATGACTAAGACTAGCG |
| | TTGATTGTACCATGTATATTTGTGGCGACTCTACCGAATGTT |
| | CTAACCTGCTGCTTCAGTACGGCTCATTTTGCACACAGCTG |
| | AACAGAGCCCTGACTGGGATCGCTGTGGAGCAGGACAAGA |
| | ACACACAGGAGGTGTTTGCACAGGTGAAGCAGATCTATAA |
| | GACCCCTCCTATTAAGGATTTCGGCGGATTCAATTTCTCAC |
| | AGATTCTGCCAGACCCCAGTAAGCCTTCCAAGAGGAGCTTC |
| | ATCGAGGATCTCCTGTTTAACAAGGTGACCCTGGCAGACGC |
| | CGGCTTTATTAAGCAATATGGGGATTGCCTGGGCGACATTG |
| | CTGCCAGAGACCTGATTTGCGCCCAGAAATTCAATGGCCTC |
| | ACAGTGCTGCCACCTCTGCTGACCGACGAGATGATCGCTCA |
| | ATACACTAGCGCACTGCTGGCCGGAACCATCACATCAGGCT |
| | GGACCTTCGGGGCCGGAGCAGCACTGCAGATTCCATTCGCC |
| | ATGCAGATGGCCTATAGATTCAACGGCATTGGCGTCACACA |
| | GAACGTGCTGTACGAAAACCAGAAGCTCATCGCTAACCAG |
| | TTTAATTCCGCAATTGGAAAGATCCAAGATTCACTCAGCTC |
| | AACCGCCTCTGCACTCGGAAAGCTGCAGGACGTGGTCAAC |
| | CAGAATGCTCAGGCCCTGAACACACTCGTCAAGCAGCTGTC |
| | CTCTAACTTTGGCGCTATCAGCTCCGTTCTGAACGACATTCT |
| | GAGCCGCCTGCCTCCACCCGAGGCTGAAGTCCAGATTGACC |
| | GCCTGATTACCGGCCGGCTGCAGTCTCTGCAAACATACGTG |
| | ACCCAGCAGCTGATCAGAGCAGCCGAGATCCGGGCATCCG |
| | CAAATCTGGCAGCAACTAAGATGAGCGAATGCGTGCTGGG |
| | CCAGTCCAAGCGGGTGGACTTTTGTGGCAAGGGCTACCACC |
| | TGATGAGCTTCCCCCAGAGCGCCCCACATGGCGTTGTTTTT |
| | CTGCACGTGACCTATGTCCCTGCTCAGGAAAAGAACTTTAC |
| | AACTGCTCCTGCTATCTGCCATGACGGCAAGGCCCACTTCC |
| | CACGGGAGGGAGTGTTTGTGTCCAATGGCACACACTGGTTC |
| | GTGACCCAGAGGAACTTCTATGAACCCCAGATCATCACCAC |
| | TGACAATACCTTCGTGTCTGGAAATTGCGACGTCGTGATCG |
| | GCATCGTTAACAACACCGTGTACGACCCTCTCCAGCCAGAG |
| | CTGGACTCCTTTAAGGAGGAACTGGATAAGTATTTTAAGAA |
| | CCACACAAGCCCAGATGTGGATCTCGGGGACATCTCCGGA |
| | ATTAACGCCTCCGTGGTGAATATCCAGAAGGAGATTGACC |
| | GCCTAAATGAAGTTGCCAAGAACCTCAATGAGTCTCTGATT |
| | GATCTGCAGGAACTGGGCAAGTATGAGCAGTATATCAAAT |
| | GGCCCTGGTACATTTGGCTGGGGTTTATCGCCGGACTGATT |
| | GCCATCGTCATGGTGACCATCATGCTGTGTTGCATGACCTC |
| | CTGTTGTTCCTGTCTGAAGGGCTGCTGTAGTTGCGGCTCTTG |
| | CTGTAAATTCGACGAAGATGATAGCGAGCCCGTGCTGAAG |
| | GGCGTGAAGCTGCATTATACCTGA |
| A SARS-CoV-2 S | (SEQ ID NO: 94) |
| protein which has been | MFVFLVLLPLVSSQCVNLTTRTQLPPAYTNSFTRGVYYPDKVF |
| modified to remove a | RSSVLHSTQDLFLPFFSNVTWFHAIHVSGTNGTKRFDNPVLPF |
| furin cleavage site and | NDGVYFASTEKSNIIRGWIFGTTLDSKTQSLLIVNNATNVVIKV |
| to replace residues 985, | CEFQFCNDPFLGVYYHKNNKSWMESEFRVYSSANNCTFEYVS |
| 986 and 987 with proline | QPFLMDLEGKQGNFKNLREFVFKNIDGYFKIYSKHTPINLVRD |
| | LPQGFSALEPLVDLPIGINITRFQTLLALHRSYLTPGDSSSGWT |
| | AGAAAYYVGYLQPRTFLLKYNENGTITDAVDCALDPLSETKC |
| | TLKSFTVEKGIYQTSNFRVQPTESIVRFPNITNLCPFGEVFNATR |
| | FASVYAWNRKRISNCVADYSVLYNSASFSTFKCYGVSPTKLN |
| | DLCFTNVYADSFVIRGDEVRQIAPGQTGKIADYNYKLPDDFTG |
| | CVIAWNSNNLDSKVGGNYNYLYRLFRKSNLKPFERDISTEIYQ |
| | AGSTPCNGVEGFNCYFPLQSYGFQPTNGVGYQPYRVVVLSFE |
| | LLHAPATVCGPKKSTNLVKNKCVNFNFNGLTGTGVLTESNKK |
| | FLPFQQFGRDIADTTDAVRDPQTLEILDITPCSFGGVSVITPGTN |
| | TSNQVAVLYQDVNCTEVPVAIHADQLTPTWRVYSTGSNVFQT |
| | RAGCLIGAEHVNNSYECDIPIGAGICASYQTQTNSPGSASSVAS |
| | QSIIAYTMSLGAENSVAYSNNSIAIPTNFTISVTTEILPVSMTKT |
| | SVDCTMYICGDSTECSNLLLQYGSFCTQLNRALTGIAVEQDK |
| | NTQEVFAQVKQIYKTPPIKDFGGFNFSQILPDPSKPSKRSFIEDL |
| | LFNKVTLADAGFIKQYGDCLGDIAARDLICAQKFNGLTVLPPL |
| | LTDEMIAQYTSALLAGTITSGWTFGAGAALQIPFAMQMAYRF |
| | NGIGVTQNVLYENQKLIANQFNSAIGKIQDSLSSTASALGKLQ |
| | DVVNQNAQALNTLVKQLSSNFGAISSVLNDILSRLPPPEAEVQ |
| | IDRLITGRLQSLQTYVTQQLIRAAEIRASANLAATKMSECVLG |
| | QSKRVDFCGKGYHLMSFPQSAPHGVVFLHVTYVPAQEKNFTT |
| | APAICHDGKAHFPREGVFVSNGTHWFVTQRNFYEPQIITTDNT |
| | FVSGNCDVVIGIVNNTVYDPLQPELDSFKEELDKYFKNHTSPD |
| | VDLGDISGINASVVNIQKEIDRLNEVAKNLNESLIDLQELGKYE |
| | QYIKWPWYIWLGFIAGLIAIVMVTIMLCCMTSCCSCLKGCCSC |
| | GSCCKFDEDDSEPVLKGVKLHYT |
| Optimized nucleotide | (SEQ ID NO: 95) |
| sequence encoding a | ATGTTCGTCTTCCTCGTGCTGCTCCCACTCGTTTCTTCCCAG |
| SARS-CoV-2 S2′ | TGTAGCTTCATCGAGGATCTCCTGTTTAACAAGGTGACCCT |
| subunit protein | GGCAGACGCCGGCTTTATTAAGCAATATGGGGATTGCCTGG |
| sequence with a signal | GCGACATTGCTGCCAGAGACCTGATTTGCGCCCAGAAATTC |
| sequence | AATGGCCTCACAGTGCTGCCACCTCTGCTGACCGACGAGAT |
| | GATCGCTCAATACACTAGCGCACTGCTGGCCGGAACCATCA |
| | CATCAGGCTGGACCTTCGGGGCCGGAGCAGCACTGCAGAT |
| | TCCATTCGCCATGCAGATGGCCTATAGATTCAACGGCATTG |
| | GCGTCACACAGAACGTGCTGTACGAAAACCAGAAGCTCAT |
| | CGCTAACCAGTTTAATTCCGCAATTGGAAAGATCCAAGATT |
| | CACTCAGCTCAACCGCCTCTGCACTCGGAAAGCTGCAGGAC |
| | GTGGTCAACCAGAATGCTCAGGCCCTGAACACACTCGTCA |
| | AGCAGCTGTCCTCTAACTTTGGCGCTATCAGCTCCGTTCTG |
| | AACGACATTCTGAGCCGCCTGGATAAGGTGGAGGCTGAAG |
| | TCCAGATTGACCGCCTGATTACCGGCCGGCTGCAGTCTCTG |
| | CAAACATACGTGACCCAGCAGCTGATCAGAGCAGCCGAGA |
| | TCCGGGCATCCGCAAATCTGGCAGCAACTAAGATGAGCGA |
| | ATGCGTGCTGGGCCAGTCCAAGCGGGTGGACTTTTGTGGCA |
| | AGGGCTACCACCTGATGAGCTTCCCCCAGAGCGCCCCACAT |
| | GGCGTTGTTTTTCTGCACGTGACCTATGTCCCTGCTCAGGA |
| | AAAGAACTTTACAACTGCTCCTGCTATCTGCCATGACGGCA |
| | AGGCCCACTTCCCACGGGAGGGAGTGTTTGTGTCCAATGGC |
| | ACACACTGGTTCGTGACCCAGAGGAACTTCTATGAACCCCA |
| | GATCATCACCACTGACAATACCTTCGTGTCTGGAAATTGCG |
| | ACGTCGTGATCGGCATCGTTAACAACACCGTGTACGACCCT |
| | CTCCAGCCAGAGCTGGACTCCTTTAAGGAGGAACTGGATA |
| | AGTATTTTAAGAACCACACAAGCCCAGATGTGGATCTCGG |
| | GGACATCTCCGGAATTAACGCCTCCGTGGTGAATATCCAGA |
| | AGGAGATTGACCGCCTAAATGAAGTTGCCAAGAACCTCAA |
| | TGAGTCTCTGATTGATCTGCAGGAACTGGGCAAGTATGAGC |
| | AGTATATCAAATGGCCCTGGTACATTTGGCTGGGGTTTATC |
| | GCCGGACTGATTGCCATCGTCATGGTGACCATCATGCTGTG |
| | TTGCATGACCTCCTGTTGTTCCTGTCTGAAGGGCTGCTGTA |
| | GTTGCGGCTCTTGCTGTAAATTCGACGAAGATGATAGCGAG |
| | CCCGTGCTGAAGGGCGTGAAGCTGCATTATACCTGA |
| Full length SARS-CoV-2 | (SEQ ID NO: 96) |
| S2′ subunit of a SARS | MFVFLVLLPLVSSQCSFIEDLLFNKVTLADAGFIKQYGDCLGDI |
| CoV-2 protein with a | AARDLICAQKFNGLTVLPPLLTDEMIAQYTSALLAGTITSGWT |
| signal sequence | FGAGAALQIPFAMQMAYRFNGIGVTQNVLYENQKLIANQFNS |
| | AIGKIQDSLSSTASALGKLQDVVNQNAQALNTLVKQLSSNFG |
| | AISSVLNDILSRLDKVEAEVQIDRLITGRLQSLQTYVTQQLIRA |
| | AEIRASANLAATKMSECVLGQSKRVDFCGKGYHLMSFPQSAP |
| | HGVVFLHVTYVPAQEKNFTTAPAICHDGKAHFPREGVFVSNG |
| | THWFVTQRNFYEPQIITTDNTFVSGNCDVVIGIVNNTVYDPLQ |
| | PELDSFKEELDKYFKNHTSPDVDLGDISGINASVVNIQKEIDRL |
| | NEVAKNLNESLIDLQELGKYEQYIKWPWYIWLGFIAGLIAIVM |
| | VTIMLCCMTSCCSCLKGCCSCGSCCKFDEDDSEPVLKGVKLH |
| | YT |
| Optimized nucleotide | (SEQ ID NO: 105) |
| sequence encoding a | ATGTTCGTCTTCCTCGTGCTGCTCCCACTCGTTTCTTCCCAG |
| receptor-binding | TGTCCTAATATCACTAACCTGTGTCCTTTCGGTGAAGTGTTC |
| domain of SARS-CoV-2 | AACGCCACCAGGTTTGCTAGCGTGTATGCCTGGAACAGGA |
| S protein with a signal | AGAGGATCTCTAACTGCGTCGCCGACTATTCCGTGCTGTAT |
| sequence and a mutated | AACAGCGCCTCCTTCTCCACATTCAAATGCTATGGAGTGAG |
| Fc region | CCCGACAAAACTGAACGATCTCTGCTTTACAAATGTCTACG |
| (L309D/Q311H/N434S) | CCGACTCTTTTGTGATCAGAGGGGACGAGGTCCGGCAGATC |
| | GCACCAGGACAGACAGGCAAGATTGCTGACTACAACTATA |
| | AGCTGCCTGACGACTTCACAGGATGTGTGATCGCATGGAAC |
| | TCAAACAATCTGGACTCCAAAGTCGGGGGCAACTATAATT |
| | ACCTGTATCGCCTGTTCCGGAAGTCCAACCTGAAGCCCTTC |
| | GAGAGGGACATCAGTACAGAGATCTATCAGGCTGGCTCCA |
| | CCCCTTGCAATGGCGTCGAAGGCTTTAATTGTTATTTTCCCC |
| | TGCAGTCTTACGGGTTTCAGCCTACTAATGGAGTTGGGTAC |
| | CAGCCATACAGAGTGGTCGTGCTCAGCTTCGAGCTCCTGCA |
| | TGCTCCACCTAAGTCCTGCGACAAAACCCATACATGTCCAC |
| | CATGCCCAGCTCCTGAACTGCTCGGCGGGCCTAGTGTTTTC |
| | CTCTTCCCTCCTAAGCCCAAGGATACCCTCATGATCTCTCG |
| | CACACCAGAAGTGACCTGCGTGGTCGTGGATGTCTCTCACG |
| | AGGATCCTGAAGTGAAGTTTAACTGGTATGTCGACGGAGT |
| | GGAAGTGCACAACGCCAAGACAAAGCCAAGAGAAGAACA |
| | ATACAATTCTACTTATAGGGTGGTGTCTGTGCTGACAGTGG |
| | ATCACCATGATTGGCTGAATGGAAAAGAATATAAGTGTAA |
| | GGTCTCTAACAAGGCCCTGCCCGCTCCAATTGAGAAGACA |
| | ATTTCCAAGGCCAAGGGGCAGCCTCGGGAACCTCAGGTGT |
| | ACACACTGCCCCCATCCAGGGATGAACTGACTAAAAATCA |
| | GGTGTCTCTGACATGCCTGGTGAAAGGGTTTTATCCAAGTG |
| | ACATTGCTGTGGAGTGGGAGTCTAATGGGCAGCCTGAAAA |
| | TAACTACAAGACCACACCACCAGTGCTCGATAGCGACGGG |
| | TCTTTCTTTCTGTATTCTAAACTGACCGTGGATAAATCTCGG |
| | TGGCAGCAGGGAAACGTGTTTTCTTGCTCAGTGATGCACGA |
| | AGCTCTGCACTCTCACTATACACAGAAATCCCTGTCCCTGT |
| | CTCCAGGCAAATAA |
| A receptor-binding | (SEQ ID NO: 104) |
| domain of SARS-CoV-2 | MFVFLVLLPLVSSQCPNITNLCPFGEVFNATRFASVYAWNRKR |
| S protein with a signal | ISNCVADYSVLYNSASFSTFKCYGVSPTKLNDLCFTNVYADSF |
| sequence and a mutated | VIRGDEVRQIAPGQTGKIADYNYKLPDDFTGCVIAWNSNNLD |
| Fc region | SKVGGNYNYLYRLFRKSNLKPFERDISTEIYQAGSTPCNGVEG |
| (L309D/Q311H/N434S) | FNCYFPLQSYGFQPTNGVGYQPYRVVVLSFELLHAPPKSCDKT |
| | HTCPPCPAPELLGGPSVFLFPPKPKDTLMISRTPEVTCVVVDVSH |
| | EDPEVKFNWYVDGVEVHNAKTKPREEQYNSTYRVVSVLTVDHHD |
| | WLNGKEYKCKVSNKALPAPIEKTISKAKGOPREPQVYTLPPSRDE |
| | LTKNQVSLTCLVKGFYPSDIAVEWESNGQPENNYKTTPPVLDSDG |
| | SFFLYSKLTVDKSRWQQGNVFSCSVMHEALHSHYTQKSLSLSPGK |
| Optimized nucleotide | (SEQ ID NO: 107) |
| sequence encoding a | ATGTTCGTCTTCCTCGTGCTGCTCCCACTCGTTTCTTCCCAG |
| receptor-binding | TGTCCTAATATCACTAACCTGTGTCCTTTCGGTGAAGTGTTC |
| domain of SARS-CoV-2 | AACGCCACCAGGTTTGCTAGCGTGTATGCCTGGAACAGGA |
| S protein with a signal | AGAGGATCTCTAACTGCGTCGCCGACTATTCCGTGCTGTAT |
| sequence and a mutated | AACAGCGCCTCCTTCTCCACATTCAAATGCTATGGAGTGAG |
| Fc region | CCCGACAAAACTGAACGATCTCTGCTTTACAAATGTCTACG |
| (M428L/N434S) | CCGACTCTTTTGTGATCAGAGGGGACGAGGTCCGGCAGATC |
| | GCACCAGGACAGACAGGCAAGATTGCTGACTACAACTATA |
| | AGCTGCCTGACGACTTCACAGGATGTGTGATCGCATGGAAC |
| | TCAAACAATCTGGACTCCAAAGTCGGGGGCAACTATAATT |
| | ACCTGTATCGCCTGTTCCGGAAGTCCAACCTGAAGCCCTTC |
| | GAGAGGGACATCAGTACAGAGATCTATCAGGCTGGCTCCA |
| | CCCCTTGCAATGGCGTCGAAGGCTTTAATTGTTATTTTCCCC |
| | TGCAGTCTTACGGGTTTCAGCCTACTAATGGAGTTGGGTAC |
| | CAGCCATACAGAGTGGTCGTGCTCAGCTTCGAGCTCCTGCA |
| | TGCTCCACCTAAGTCCTGCGACAAAACCCATACATGTCCAC |
| | CATGCCCAGCTCCTGAACTGCTCGGCGGGCCTAGTGTTTTC |
| | CTCTTCCCTCCTAAGCCCAAGGATACCCTCTATATCACTCG |
| | CGAACCAGAAGTGACCTGCGTGGTCGTGGATGTCTCTCACG |
| | AGGATCCTGAAGTGAAGTTTAACTGGTATGTCGACGGAGT |
| | GGAAGTGCACAACGCCAAGACAAAGCCAAGAGAAGAACA |
| | ATACAATTCTACTTATAGGGTGGTGTCTGTGCTGACAGTGC |
| | TGCACCAGGATTGGCTGAATGGAAAAGAATATAAGTGTAA |
| | GGTCTCTAACAAGGCCCTGCCCGCTCCAATTGAGAAGACA |
| | ATTTCCAAGGCCAAGGGGCAGCCTCGGGAACCTCAGGTGT |
| | ACACACTGCCCCCATCCAGGGATGAACTGACTAAAAATCA |
| | GGTGTCTCTGACATGCCTGGTGAAAGGGTTTTATCCAAGTG |
| | ACATTGCTGTGGAGTGGGAGTCTAATGGGCAGCCTGAAAA |
| | TAACTACAAGACCACACCACCAGTGCTCGATAGCGACGGG |
| | TCTTTCTTTCTGTATTCTAAACTGACCGTGGATAAATCTCGG |
| | TGGCAGCAGGGAAACGTGTTTTCTTGCTCAGTGATGCACGA |
| | AGCTCTGCACAATCACTATACACAGAAATCCCTGTCCCTGT |
| | CTCCAGGCAAATAA |
| A receptor-binding | (SEQ ID NO: 106) |
| domain of SARS-CoV-2 | MFVFLVLLPLVSSQCPNITNLCPFGEVFNATRFASVYAWNRKR |
| S protein with a signal | ISNCVADYSVLYNSASFSTFKCYGVSPTKLNDLCFTNVYADSF |
| sequence and a mutated | VIRGDEVRQIAPGQTGKIADYNYKLPDDFTGCVIAWNSNNLD |
| Fc region | SKVGGNYNYLYRLFRKSNLKPFERDISTEIYQAGSTPCNGVEG |
| (M428L/N434S) | FNCYFPLQSYGFQPTNGVGYQPYRVVVLSFELLHAPPKSCDKT |
| | HTCPPCPAPELLGGPSVFLFPPKPKDTLMISRTPEVTCVVVDVSH |
| | EDPEVKFNWYVDGVEVHNAKTKPREEQYNSTYRVVSVLTVLHQD |
| | WLNGKEYKCKVSNKALPAPIEKTISKAKGQPREPQVYTLPPSRDE |
| | LTKNQVSLTCLVKGFYPSDIAVEWESNGQPENNYKTTPPVLDSDG |
| | SFFLYSKLTVDKSRWQQGNVFSCSVLHEALHSHYTQKSLSLSPGK |
| Optimized nucleotide | (SEQ ID NO: 109) |
| sequence encoding a | ATGTTCGTCTTCCTCGTGCTGCTCCCACTCGTTTCTTCCCAG |
| receptor-binding | TGTCCTAATATCACTAACCTGTGTCCTTTCGGTGAAGTGTTC |
| domain of SARS-CoV-2 | AACGCCACCAGGTTTGCTAGCGTGTATGCCTGGAACAGGA |
| S protein with a signal | AGAGGATCTCTAACTGCGTCGCCGACTATTCCGTGCTGTAT |
| sequence and a mutated | AACAGCGCCTCCTTCTCCACATTCAAATGCTATGGAGTGAG |
| Fc region | CCCGACAAAACTGAACGATCTCTGCTTTACAAATGTCTACG |
| (M252Y/S254T/T256E) | CCGACTCTTTTGTGATCAGAGGGGACGAGGTCCGGCAGATC |
| | GCACCAGGACAGACAGGCAAGATTGCTGACTACAACTATA |
| | AGCTGCCTGACGACTTCACAGGATGTGTGATCGCATGGAAC |
| | TCAAACAATCTGGACTCCAAAGTCGGGGGCAACTATAATT |
| | ACCTGTATCGCCTGTTCCGGAAGTCCAACCTGAAGCCCTTC |
| | GAGAGGGACATCAGTACAGAGATCTATCAGGCTGGCTCCA |
| | CCCCTTGCAATGGCGTCGAAGGCTTTAATTGTTATTTTCCCC |
| | TGCAGTCTTACGGGTTTCAGCCTACTAATGGAGTTGGGTAC |
| | CAGCCATACAGAGTGGTCGTGCTCAGCTTCGAGCTCCTGCA |
| | TGCTCCACCTAAGTCCTGCGACAAAACCCATACATGTCCAC |
| | CATGCCCAGCTCCTGAACTGCTCGGCGGGCCTAGTGTTTTC |
| | CTCTTCCCTCCTAAGCCCAAGGATACCCTCTATATCACTCG |
| | CGAACCAGAAGTGACCTGCGTGGTCGTGGATGTCTCTCACG |
| | AGGATCCTGAAGTGAAGTTTAACTGGTATGTCGACGGAGT |
| | GGAAGTGCACAACGCCAAGACAAAGCCAAGAGAAGAACA |
| | ATACAATTCTACTTATAGGGTGGTGTCTGTGCTGACAGTGC |
| | TGCACCAGGATTGGCTGAATGGAAAAGAATATAAGTGTAA |
| | GGTCTCTAACAAGGCCCTGCCCGCTCCAATTGAGAAGACA |
| | ATTTCCAAGGCCAAGGGGCAGCCTCGGGAACCTCAGGTGT |
| | ACACACTGCCCCCATCCAGGGATGAACTGACTAAAAATCA |
| | GGTGTCTCTGACATGCCTGGTGAAAGGGTTTTATCCAAGTG |
| | ACATTGCTGTGGAGTGGGAGTCTAATGGGCAGCCTGAAAA |
| | TAACTACAAGACCACACCACCAGTGCTCGATAGCGACGGG |
| | TCTTTCTTTCTGTATTCTAAACTGACCGTGGATAAATCTCGG |
| | TGGCAGCAGGGAAACGTGTTTTCTTGCTCAGTGATGCACGA |
| | AGCTCTGCACAATCACTATACACAGAAATCCCTGTCCCTGT |
| | CTCCAGGCAAATAA |
| A receptor-binding | (SEQ ID NO: 108) |
| domain of SARS-CoV-2 | MFVFLVLLPLVSSQCPNITNLCPFGEVFNATRFASVYAWNRKR |
| S protein with a signal | ISNCVADYSVLYNSASFSTFKCYGVSPTKLNDLCFTNVYADSF |
| sequence and a mutated | VIRGDEVRQIAPGQTGKIADYNYKLPDDFTGCVIAWNSNNLD |
| Fc region | SKVGGNYNYLYRLFRKSNLKPFERDISTEIYQAGSTPCNGVEG |
| (M252Y/S254T/T256E) | FNCYFPLQSYGFQPTNGVGYQPYRVVVLSFELLHAPPKSCDKT |
| | HTCPPCPAPELLGGPSVFLFPPKPKDTLYITREPEVTCVVVDVSH |
| | EDPEVKFNWYVDGVEVHNAKTKPREEQYNSTYRVVSVLTVLHQD |
| | WLNGKEYKCKVSNKALPAPIEKTISKAKGQPREPQVYTLPPSRDE |
| | LTKNQVSLTCLVKGFYPSDIAVEWESNGQPENNYKTTPPVLDSDG |
| | SFFLYSKLTVDKSRWQQGNVFSCSVMHEALHNHYTQKSLSLSPGK |
| Optimized nucleotide | (SEQ ID NO: 111) |
| sequence encoding a | ATGTTCGTCTTCCTCGTGCTGCTCCCACTCGTTTCTTCCCAG |
| receptor-binding | TGTCCTAATATCACTAACCTGTGTCCTTTCGGTGAAGTGTTC |
| domain of SARS-CoV-2 | AACGCCACCAGGTTTGCTAGCGTGTATGCCTGGAACAGGA |
| S protein with a signal | AGAGGATCTCTAACTGCGTCGCCGACTATTCCGTGCTGTAT |
| sequence and a mutated | AACAGCGCCTCCTTCTCCACATTCAAATGCTATGGAGTGAG |
| Fc region | CCCGACAAAACTGAACGATCTCTGCTTTACAAATGTCTACG |
| (H433K/N434F) | CCGACTCTTTTGTGATCAGAGGGGACGAGGTCCGGCAGATC |
| | GCACCAGGACAGACAGGCAAGATTGCTGACTACAACTATA |
| | AGCTGCCTGACGACTTCACAGGATGTGTGATCGCATGGAAC |
| | TCAAACAATCTGGACTCCAAAGTCGGGGGCAACTATAATT |
| | ACCTGTATCGCCTGTTCCGGAAGTCCAACCTGAAGCCCTTC |
| | GAGAGGGACATCAGTACAGAGATCTATCAGGCTGGCTCCA |
| | CCCCTTGCAATGGCGTCGAAGGCTTTAATTGTTATTTTCCCC |
| | TGCAGTCTTACGGGTTTCAGCCTACTAATGGAGTTGGGTAC |
| | CAGCCATACAGAGTGGTCGTGCTCAGCTTCGAGCTCCTGCA |
| | TGCTCCACCTAAGTCCTGCGACAAAACCCATACATGTCCAC |
| | CATGCCCAGCTCCTGAACTGCTCGGCGGGCCTAGTGTTTTC |
| | CTCTTCCCTCCTAAGCCCAAGGATACCCTCATGATCTCTCG |
| | CACACCAGAAGTGACCTGCGTGGTCGTGGATGTCTCTCACG |
| | AGGATCCTGAAGTGAAGTTTAACTGGTATGTCGACGGAGT |
| | GGAAGTGCACAACGCCAAGACAAAGCCAAGAGAAGAACA |
| | ATACAATTCTACTTATAGGGTGGTGTCTGTGCTGACAGTGC |
| | TGCACCAGGATTGGCTGAATGGAAAAGAATATAAGTGTAA |
| | GGTCTCTAACAAGGCCCTGCCCGCTCCAATTGAGAAGACA |
| | ATTTCCAAGGCCAAGGGGCAGCCTCGGGAACCTCAGGTGT |
| | ACACACTGCCCCCATCCAGGGATGAACTGACTAAAAATCA |
| | GGTGTCTCTGACATGCCTGGTGAAAGGGTTTTATCCAAGTG |
| | ACATTGCTGTGGAGTGGGAGTCTAATGGGCAGCCTGAAAA |
| | TAACTACAAGACCACACCACCAGTGCTCGATAGCGACGGG |
| | TCTTTCTTTCTGTATTCTAAACTGACCGTGGATAAATCTCGG |
| | TGGCAGCAGGGAAACGTGTTTTCTTGCTCAGTGATGCACGA |
| | AGCTCTGAAATTTCACTATACACAGAAATCCCTGTCCCTGT |
| | CTCCAGGCAAATAA |
| A receptor-binding | (SEQ ID NO: 110) |
| domain of SARS-CoV-2 | MFVFLVLLPLVSSQCPNITNLCPFGEVFNATRFASVYAWNRKR |
| S protein with a signal | ISNCVADYSVLYNSASFSTFKCYGVSPTKLNDLCFTNVYADSF |
| sequence and a mutated | VIRGDEVRQIAPGQTGKIADYNYKLPDDFTGCVIAWNSNNLD |
| Fc region | SKVGGNYNYLYRLFRKSNLKPFERDISTEIYQAGSTPCNGVEG |
| (H433K/N434F) | FNCYFPLQSYGFQPTNGVGYQPYRVVVLSFELLHAPPKSCDKT |
| | HTCPPCPAPELLGGPSVFLFPPKPKDTLMISRTPEVTCVVVDVSH |
| | EDPEVKFNWYVDGVEVHNAKTKPREEQYNSTYRVVSVLTVLHQD |
| | WLNGKEYKCKVSNKALPAPIEKTISKAKGQPREPQVYTLPPSRDE |
| | LTKNQVSLTCLVKGFYPSDIAVEWESNGQPENNYKTTPPVLDSDG |
| | SFFLYSKLTVDKSRWQQGNVFSCSVMHEALKFHYTQKSLSLSPGK |
| SARS-CoV-2 S protein | (SEQ ID NO: 122) |
| mutated to remove a | ATGTTCCTGCTGACAACAAAAAGAACCATGTTTGTGTTCCT |
| furin cleavage site, to | GGTGCTGCTGCCTCTGGTGTCCTCACAGTGTGTCAACCTGA |
| replace residues 986 and | CAACAAGAACTCAGCTGCCACCAGCCTACACCAACTCCTTC |
| 987 with proline and | ACCAGAGGCGTGTATTACCCAGACAAGGTGTTTAGAAGCA |
| containing an extended | GCGTGCTGCACTCTACCCAGGACCTCTTTCTGCCCTTTTTCA |
| signal sequence | GCAACGTGACATGGTTTCACGCAATTCACGTGTCCGGCACT |
| | AATGGCACAAAGCGGTTCGACAATCCAGTCCTGCCTTTCAA |
| | CGATGGCGTCTACTTTGCATCTACTGAGAAATCCAATATCA |
| | TTAGGGGATGGATCTTCGGCACAACCCTGGATTCTAAGACC |
| | CAGAGCCTGCTGATCGTCAACAACGCCACAAACGTGGTCA |
| | TTAAGGTTTGCGAGTTTCAGTTCTGTAACGATCCTTTTCTGG |
| | GCGTGTATTATCATAAGAACAATAAGAGCTGGATGGAGTC |
| | CGAGTTTAGAGTGTATAGCTCTGCAAATAATTGTACCTTTG |
| | AGTACGTGAGCCAGCCCTTTCTGATGGACCTGGAGGGAAA |
| | ACAAGGAAACTTCAAAAACCTGCGGGAATTCGTTTTCAAA |
| | AACATCGACGGCTATTTCAAGATCTATAGCAAGCATACCCC |
| | AATCAACCTCGTGAGGGACCTCCCCCAGGGCTTTAGCGCAC |
| | TGGAGCCACTGGTTGACCTGCCTATCGGCATTAATATCACA |
| | AGATTTCAGACCCTGCTGGCACTGCATAGAAGCTATCTGAC |
| | CCCTGGAGACTCCTCTAGTGGGTGGACTGCCGGCGCCGCTG |
| | CCTACTATGTGGGCTATCTGCAGCCACGGACATTCCTGCTG |
| | AAATACAATGAGAACGGGACAATCACAGATGCTGTTGATT |
| | GCGCACTCGACCCCCTGTCCGAGACAAAGTGCACTCTCAAG |
| | AGCTTTACCGTCGAGAAGGGCATCTATCAGACCTCAAACTT |
| | CAGGGTGCAGCCCACAGAATCTATCGTGCGCTTCCCTAATA |
| | TCACTAACCTGTGTCCTTTCGGTGAAGTGTTCAACGCCACC |
| | AGGTTTGCTAGCGTGTATGCCTGGAACAGGAAGAGGATCT |
| | CTAACTGCGTCGCCGACTATTCCGTGCTGTATAACAGCGCC |
| | TCCTTCTCCACATTCAAATGCTATGGAGTGAGCCCGACAAA |
| | ACTGAACGATCTCTGCTTTACAAATGTCTACGCCGACTCTT |
| | TTGTGATCAGAGGGGACGAGGTCCGGCAGATCGCACCAGG |
| | ACAGACAGGCAAGATTGCTGACTACAACTATAAGCTGCCT |
| | GACGACTTCACAGGATGTGTGATCGCATGGAACTCAAACA |
| | ATCTGGACTCCAAAGTCGGGGGCAACTATAATTACCTGTAT |
| | CGCCTGTTCCGGAAGTCCAACCTGAAGCCCTTCGAGAGGG |
| | ACATCAGTACAGAGATCTATCAGGCTGGCTCCACCCCTTGC |
| | AATGGCGTCGAAGGCTTTAATTGTTATTTTCCCCTGCAGTCT |
| | TACGGGTTTCAGCCTACTAATGGAGTTGGGTACCAGCCATA |
| | CAGAGTGGTCGTGCTCAGCTTCGAGCTCCTGCATGCTCCAG |
| | CTACAGTTTGCGGGCCAAAGAAGTCCACTAACCTGGTGAA |
| | GAATAAGTGCGTCAACTTCAACTTTAACGGGCTCACCGGCA |
| | CCGGCGTGCTGACTGAGAGCAACAAGAAGTTTCTGCCATTT |
| | CAACAGTTTGGACGGGACATTGCCGACACCACCGATGCCG |
| | TTCGGGATCCACAGACCCTGGAAATTCTGGACATTACACCG |
| | TGCAGCTTCGGGGGCGTGAGCGTGATCACACCCGGAACCA |
| | ATACAAGCAACCAGGTTGCCGTCCTGTATCAGGATGTCAAT |
| | TGCACAGAAGTGCCAGTTGCTATCCACGCAGACCAGCTGA |
| | CTCCCACATGGCGGGTGTATAGCACCGGATCCAACGTGTTT |
| | CAGACCCGCGCCGGATGTCTCATTGGGGCCGAGCACGTGA |
| | ATAACAGCTACGAGTGCGACATCCCCATTGGCGCCGGCATT |
| | TGTGCGTCTTACCAGACTCAGACCAACTCTCCTGGCTCCGC |
| | CTCTTCCGTTGCTAGTCAGTCTATTATTGCCTATACCATGAG |
| | CCTCGGAGCTGAGAATAGCGTGGCCTACTCCAATAATTCCA |
| | TCGCAATCCCTACTAACTTCACTATTTCTGTGACCACCGAG |
| | ATCCTGCCTGTGTCTATGACTAAGACTAGCGTTGATTGTAC |
| | CATGTATATTTGTGGCGACTCTACCGAATGTTCTAACCTGC |
| | TGCTTCAGTACGGCTCATTTTGCACACAGCTGAACAGAGCC |
| | CTGACTGGGATCGCTGTGGAGCAGGACAAGAACACACAGG |
| | AGGTGTTTGCACAGGTGAAGCAGATCTATAAGACCCCTCCT |
| | ATTAAGGATTTCGGCGGATTCAATTTCTCACAGATTCTGCC |
| | AGACCCCAGTAAGCCTTCCAAGAGGAGCTTCATCGAGGAT |
| | CTCCTGTTTAACAAGGTGACCCTGGCAGACGCCGGCTTTAT |
| | TAAGCAATATGGGGATTGCCTGGGCGACATTGCTGCCAGA |
| | GACCTGATTTGCGCCCAGAAATTCAATGGCCTCACAGTGCT |
| | GCCACCTCTGCTGACCGACGAGATGATCGCTCAATACACTA |
| | GCGCACTGCTGGCCGGAACCATCACATCAGGCTGGACCTTC |
| | GGGGCCGGAGCAGCACTGCAGATTCCATTCGCCATGCAGA |
| | TGGCCTATAGATTCAACGGCATTGGCGTCACACAGAACGTG |
| | CTGTACGAAAACCAGAAGCTCATCGCTAACCAGTTTAATTC |
| | CGCAATTGGAAAGATCCAAGATTCACTCAGCTCAACCGCCT |
| | CTGCACTCGGAAAGCTGCAGGACGTGGTCAACCAGAATGC |
| | TCAGGCCCTGAACACACTCGTCAAGCAGCTGTCCTCTAACT |
| | TTGGCGCTATCAGCTCCGTTCTGAACGACATTCTGAGCCGC |
| | CTGGATCCCCCAGAGGCTGAAGTCCAGATTGACCGCCTGAT |
| | TACCGGCCGGCTGCAGTCTCTGCAAACATACGTGACCCAGC |
| | AGCTGATCAGAGCAGCCGAGATCCGGGCATCCGCAAATCT |
| | GGCAGCAACTAAGATGAGCGAATGCGTGCTGGGCCAGTCC |
| | AAGCGGGTGGACTTTTGTGGCAAGGGCTACCACCTGATGA |
| | GCTTCCCCCAGAGCGCCCCACATGGCGTTGTTTTTCTGCAC |
| | GTGACCTATGTCCCTGCTCAGGAAAAGAACTTTACAACTGC |
| | TCCTGCTATCTGCCATGACGGCAAGGCCCACTTCCCACGGG |
| | AGGGAGTGTTTGTGTCCAATGGCACACACTGGTTCGTGACC |
| | CAGAGGAACTTCTATGAACCCCAGATCATCACCACTGACA |
| | ATACCTTCGTGTCTGGAAATTGCGACGTCGTGATCGGCATC |
| | GTTAACAACACCGTGTACGACCCTCTCCAGCCAGAGCTGGA |
| | CTCCTTTAAGGAGGAACTGGATAAGTATTTTAAGAACCACA |
| | CAAGCCCAGATGTGGATCTCGGGGACATCTCCGGAATTAA |
| | CGCCTCCGTGGTGAATATCCAGAAGGAGATTGACCGCCTA |
| | AATGAAGTTGCCAAGAACCTCAATGAGTCTCTGATTGATCT |
| | GCAGGAACTGGGCAAGTATGAGCAGTATATCAAATGGCCC |
| | TGGTACATTTGGCTGGGGTTTATCGCCGGACTGATTGCCAT |
| | CGTCATGGTGACCATCATGCTGTGTTGCATGACCTCCTGTT |
| | GTTCCTGTCTGAAGGGCTGCTGTAGTTGCGGCTCTTGCTGT |
| | AAATTCGACGAAGATGATAGCGAGCCCGTGCTGAAGGGCG |
| | TGAAGCTGCATTATACCTGA |
| Optimized nucleotide | (SEQ ID NO: 123) |
| sequence encoding a | MFLLTTKRTMFVFLVLLPLVSSQCVNLTTRTQLPPAYTNSFTRGVYYPD |
| SARS-CoV-2 S protein | KVFRSSVLHSTQDLFLPFFSNVTWFHAIHVSGTNGTKRFDNPV |
| mutated to remove a | LPFNDGVYFASTEKSNIIRGWIFGTTLDSKTQSLLIVNNATNVV |
| furin cleavage site, to | IKVCEFQFCNDPFLGVYYHKNNKSWMESEFRVYSSANNCTFE |
| replace residues 986 and | YVSQPFLMDLEGKQGNFKNLREFVFKNIDGYFKIYSKHTPINL |
| 987 with proline and | VRDLPQGFSALEPLVDLPIGINITRFQTLLALHRSYLTPGDSSSG |
| which contains an | WTAGAAAYYVGYLQPRTFLLKYNENGTITDAVDCALDPLSET |
| extended signal | KCTLKSFTVEKGIYQTSNFRVQPTESIVRFPNITNLCPFGEVFN |
| sequence | ATRFASVYAWNRKRISNCVADYSVLYNSASFSTFKCYGVSPT |
| | KLNDLCFTNVYADSFVIRGDEVRQIAPGQTGKIADYNYKLPD |
| | DFTGCVIAWNSNNLDSKVGGNYNYLYRLFRKSNLKPFERDIS |
| | TEIYQAGSTPCNGVEGFNCYFPLQSYGFQPTNGVGYQPYRVV |
| | VLSFELLHAPATVCGPKKSTNLVKNKCVNFNFNGLTGTGVLT |
| | ESNKKFLPFQQFGRDIADTTDAVRDPQTLEILDITPCSFGGVSV |
| | ITPGTNTSNQVAVLYQDVNCTEVPVAIHADQLTPTWRVYSTG |
| | SNVFQTRAGCLIGAEHVNNSYECDIPIGAGICASYQTQTNSPGS |
| | ASSVASQSIIAYTMSLGAENSVAYSNNSIAIPTNFTISVTTEILPV |
| | SMTKTSVDCTMYICGDSTECSNLLLQYGSFCTQLNRALTGIAV |
| | EQDKNTQEVFAQVKQIYKTPPIKDFGGFNFSQILPDPSKPSKRS |
| | FIEDLLFNKVTLADAGFIKQYGDCLGDIAARDLICAQKFNGLT |
| | VLPPLLTDEMIAQYTSALLAGTITSGWTFGAGAALQIPFAMQ |
| | MAYRFNGIGVTQNVLYENQKLIANQFNSAIGKIQDSLSSTASA |
| | LGKLQDVVNQNAQALNTLVKQLSSNFGAISSVLNDILSRLDPP |
| | EAEVQIDRLITGRLQSLQTYVTQQLIRAAEIRASANLAATKMS |
| | ECVLGQSKRVDFCGKGYHLMSFPQSAPHGVVFLHVTYVPAQ |
| | EKNFTTAPAICHDGKAHFPREGVFVSNGTHWFVTQRNFYEPQI |
| | ITTDNTFVSGNCDVVIGIVNNTVYDPLQPELDSFKEELDKYFK |
| | NHTSPDVDLGDISGINASVVNIQKEIDRLNEVAKNLNESLIDLQ |
| | ELGKYEQYIKWPWYIWLGFIAGLIAIVMVTIMLCCMTSCCSCL |
| | KGCCSCGSCCKFDEDDSEPVLKGVKLHYT |
| Optimized nucleotide | (SEQ ID NO: 124) |
| sequence encoding a | ATGTTCGTCTTCCTCGTGCTGCTCCCACTCGTTTCTTCCCAG |
| SARS-CoV-2 S protein | TGTGTCAACCTGACAACTAGGACTCAGCTGCCACCAGCCTA |
| mutated to remove a | CACCAACTCCTTCACCAGAGGCGTGTATTACCCAGACAAGG |
| furin cleavage site, to | TGTTTAGAAGCAGCGTGCTGCACTCTACCCAGGACCTCTTT |
| replace residues 986 and | CTGCCCTTTTTCAGCAACGTGACATGGTTTCACGCAATTCA |
| 987 with proline and to | CGTGTCCGGCACTAATGGCACAAAGCGGTTCGACAATCCA |
| mutate the ER retrieval | GTCCTGCCTTTCAACGATGGCGTCTACTTTGCATCTACTGA |
| signal | GAAATCCAATATCATTAGGGGATGGATCTTCGGCACAACCC |
| | TGGATTCTAAGACCCAGAGCCTGCTGATCGTCAACAACGCC |
| | ACAAACGTGGTCATTAAGGTTTGCGAGTTTCAGTTCTGTAA |
| | CGATCCTTTTCTGGGCGTGTATTATCATAAGAACAATAAGA |
| | GCTGGATGGAGTCCGAGTTTAGAGTGTATAGCTCTGCAAAT |
| | AATTGTACCTTTGAGTACGTGAGCCAGCCCTTTCTGATGGA |
| | CCTGGAGGGAAAACAAGGAAACTTCAAAAACCTGCGGGAA |
| | TTCGTTTTCAAAAACATCGACGGCTATTTCAAGATCTATAG |
| | CAAGCATACCCCAATCAACCTCGTGAGGGACCTCCCCCAG |
| | GGCTTTAGCGCACTGGAGCCACTGGTTGACCTGCCTATCGG |
| | CATTAATATCACAAGATTTCAGACCCTGCTGGCACTGCATA |
| | GAAGCTATCTGACCCCTGGAGACTCCTCTAGTGGGTGGACT |
| | GCCGGCGCCGCTGCCTACTATGTGGGCTATCTGCAGCCACG |
| | GACATTCCTGCTGAAATACAATGAGAACGGGACAATCACA |
| | GATGCTGTTGATTGCGCACTCGACCCCCTGTCCGAGACAAA |
| | GTGCACTCTCAAGAGCTTTACCGTCGAGAAGGGCATCTATC |
| | AGACCTCAAACTTCAGGGTGCAGCCCACAGAATCTATCGTG |
| | CGCTTCCCTAATATCACTAACCTGTGTCCTTTCGGTGAAGT |
| | GTTCAACGCCACCAGGTTTGCTAGCGTGTATGCCTGGAACA |
| | GGAAGAGGATCTCTAACTGCGTCGCCGACTATTCCGTGCTG |
| | TATAACAGCGCCTCCTTCTCCACATTCAAATGCTATGGAGT |
| | GAGCCCGACAAAACTGAACGATCTCTGCTTTACAAATGTCT |
| | ACGCCGACTCTTTTGTGATCAGAGGGGACGAGGTCCGGCA |
| | GATCGCACCAGGACAGACAGGCAAGATTGCTGACTACAAC |
| | TATAAGCTGCCTGACGACTTCACAGGATGTGTGATCGCATG |
| | GAACTCAAACAATCTGGACTCCAAAGTCGGGGGCAACTAT |
| | AATTACCTGTATCGCCTGTTCCGGAAGTCCAACCTGAAGCC |
| | CTTCGAGAGGGACATCAGTACAGAGATCTATCAGGCTGGC |
| | TCCACCCCTTGCAATGGCGTCGAAGGCTTTAATTGTTATTTT |
| | CCCCTGCAGTCTTACGGGTTTCAGCCTACTAATGGAGTTGG |
| | GTACCAGCCATACAGAGTGGTCGTGCTCAGCTTCGAGCTCC |
| | TGCATGCTCCAGCTACAGTTTGCGGGCCAAAGAAGTCCACT |
| | AACCTGGTGAAGAATAAGTGCGTCAACTTCAACTTTAACGG |
| | GCTCACCGGCACCGGCGTGCTGACTGAGAGCAACAAGAAG |
| | TTTCTGCCATTTCAACAGTTTGGACGGGACATTGCCGACAC |
| | CACCGATGCCGTTCGGGATCCACAGACCCTGGAAATTCTGG |
| | ACATTACACCGTGCAGCTTCGGGGGCGTGAGCGTGATCAC |
| | ACCCGGAACCAATACAAGCAACCAGGTTGCCGTCCTGTATC |
| | AGGATGTCAATTGCACAGAAGTGCCAGTTGCTATCCACGCA |
| | GACCAGCTGACTCCCACATGGCGGGTGTATAGCACCGGAT |
| | CCAACGTGTTTCAGACCCGCGCCGGATGTCTCATTGGGGCC |
| | GAGCACGTGAATAACAGCTACGAGTGCGACATCCCCATTG |
| | GCGCCGGCATTTGTGCGTCTTACCAGACTCAGACCAACTCT |
| | CCTGGCTCCGCCTCTTCCGTTGCTAGTCAGTCTATTATTGCC |
| | TATACCATGAGCCTCGGAGCTGAGAATAGCGTGGCCTACTC |
| | CAATAATTCCATCGCAATCCCTACTAACTTCACTATTTCTGT |
| | GACCACCGAGATCCTGCCTGTGTCTATGACTAAGACTAGCG |
| | TTGATTGTACCATGTATATTTGTGGCGACTCTACCGAATGTT |
| | CTAACCTGCTGCTTCAGTACGGCTCATTTTGCACACAGCTG |
| | AACAGAGCCCTGACTGGGATCGCTGTGGAGCAGGACAAGA |
| | ACACACAGGAGGTGTTTGCACAGGTGAAGCAGATCTATAA |
| | GACCCCTCCTATTAAGGATTTCGGCGGATTCAATTTCTCAC |
| | AGATTCTGCCAGACCCCAGTAAGCCTTCCAAGAGGAGCTTC |
| | ATCGAGGATCTCCTGTTTAACAAGGTGACCCTGGCAGACGC |
| | CGGCTTTATTAAGCAATATGGGGATTGCCTGGGCGACATTG |
| | CTGCCAGAGACCTGATTTGCGCCCAGAAATTCAATGGCCTC |
| | ACAGTGCTGCCACCTCTGCTGACCGACGAGATGATCGCTCA |
| | ATACACTAGCGCACTGCTGGCCGGAACCATCACATCAGGCT |
| | GGACCTTCGGGGCCGGAGCAGCACTGCAGATTCCATTCGCC |
| | ATGCAGATGGCCTATAGATTCAACGGCATTGGCGTCACACA |
| | GAACGTGCTGTACGAAAACCAGAAGCTCATCGCTAACCAG |
| | TTTAATTCCGCAATTGGAAAGATCCAAGATTCACTCAGCTC |
| | AACCGCCTCTGCACTCGGAAAGCTGCAGGACGTGGTCAAC |
| | CAGAATGCTCAGGCCCTGAACACACTCGTCAAGCAGCTGTC |
| | CTCTAACTTTGGCGCTATCAGCTCCGTTCTGAACGACATTCT |
| | GAGCCGCCTGGATCCCCCAGAGGCTGAAGTCCAGATTGAC |
| | CGCCTGATTACCGGCCGGCTGCAGTCTCTGCAAACATACGT |
| | GACCCAGCAGCTGATCAGAGCAGCCGAGATCCGGGCATCC |
| | GCAAATCTGGCAGCAACTAAGATGAGCGAATGCGTGCTGG |
| | GCCAGTCCAAGCGGGTGGACTTTTGTGGCAAGGGCTACCA |
| | CCTGATGAGCTTCCCCCAGAGCGCCCCACATGGCGTTGTTT |
| | TTCTGCACGTGACCTATGTCCCTGCTCAGGAAAAGAACTTT |
| | ACAACTGCTCCTGCTATCTGCCATGACGGCAAGGCCCACTT |
| | CCCACGGGAGGGAGTGTTTGTGTCCAATGGCACACACTGGT |
| | TCGTGACCCAGAGGAACTTCTATGAACCCCAGATCATCACC |
| | ACTGACAATACCTTCGTGTCTGGAAATTGCGACGTCGTGAT |
| | CGGCATCGTTAACAACACCGTGTACGACCCTCTCCAGCCAG |
| | AGCTGGACTCCTTTAAGGAGGAACTGGATAAGTATTTTAAG |
| | AACCACACAAGCCCAGATGTGGATCTCGGGGACATCTCCG |
| | GAATTAACGCCTCCGTGGTGAATATCCAGAAGGAGATTGA |
| | CCGCCTAAATGAAGTTGCCAAGAACCTCAATGAGTCTCTGA |
| | TTGATCTGCAGGAACTGGGCAAGTATGAGCAGTATATCAA |
| | ATGGCCCTGGTACATTTGGCTGGGGTTTATCGCCGGACTGA |
| | TTGCCATCGTCATGGTGACCATCATGCTGTGTTGCATGACC |
| | TCCTGTTGTTCCTGTCTGAAGGGCTGCTGTAGTTGCGGCTCT |
| | TGCTGTAAATTCGACGAAGATGATAGCGAGCCCGTGCTGA |
| | AGGGCGTGGCCCTGGCTTATACCTGA |
| SARS-CoV-2 S protein | (SEQ ID NO: 125) |
| mutated to remove a | MFVFLVLLPLVSSQCVNLTTRTQLPPAYTNSFTRGVYYPDKVF |
| furin cleavage site, to | RSSVLHSTQDLFLPFFSNVTWFHAIHVSGTNGTKRFDNPVLPF |
| replace residues 986 and | NDGVYFASTEKSNIIRGWIFGTTLDSKTQSLLIVNNATNVVIKV |
| 987 with proline and to | CEFQFCNDPFLGVYYHKNNKSWMESEFRVYSSANNCTFEYVS |
| mutate the ER retrieval | QPFLMDLEGKQGNFKNLREFVFKNIDGYFKIYSKHTPINLVRD |
| signal | LPQGFSALEPLVDLPIGINITRFQTLLALHRSYLTPGDSSSGWT |
| | AGAAAYYVGYLQPRTFLLKYNENGTITDAVDCALDPLSETKC |
| | TLKSFTVEKGIYQTSNFRVQPTESIVRFPNITNLCPFGEVFNATR |
| | FASVYAWNRKRISNCVADYSVLYNSASFSTFKCYGVSPTKLN |
| | DLCFTNVYADSFVIRGDEVRQIAPGQTGKIADYNYKLPDDFTG |
| | CVIAWNSNNLDSKVGGNYNYLYRLFRKSNLKPFERDISTEIYQ |
| | AGSTPCNGVEGFNCYFPLQSYGFQPTNGVGYQPYRVVVLSFE |
| | LLHAPATVCGPKKSTNLVKNKCVNFNFNGLTGTGVLTESNKK |
| | FLPFQQFGRDIADTTDAVRDPQTLEILDITPCSFGGVSVITPGTN |
| | TSNQVAVLYQDVNCTEVPVAIHADQLTPTWRVYSTGSNVFQT |
| | RAGCLIGAEHVNNSYECDIPIGAGICASYQTQTNSPGSASSVAS |
| | QSIIAYTMSLGAENSVAYSNNSIAIPTNFTISVTTEILPVSMTKT |
| | SVDCTMYICGDSTECSNLLLQYGSFCTQLNRALTGIAVEQDK |
| | NTQEVFAQVKQIYKTPPIKDFGGFNFSQILPDPSKPSKRSFIEDL |
| | LFNKVTLADAGFIKQYGDCLGDIAARDLICAQKFNGLTVLPPL |
| | LTDEMIAQYTSALLAGTITSGWTFGAGAALQIPFAMQMAYRF |
| | NGIGVTQNVLYENQKLIANQFNSAIGKIQDSLSSTASALGKLQ |
| | DVVNQNAQALNTLVKQLSSNFGAISSVLNDILSRLDPPEAEVQ |
| | IDRLITGRLQSLQTYVTQQLIRAAEIRASANLAATKMSECVLG |
| | QSKRVDFCGKGYHLMSFPQSAPHGVVFLHVTYVPAQEKNFTT |
| | APAICHDGKAHFPREGVFVSNGTHWFVTQRNFYEPQIITTDNT |
| | FVSGNCDVVIGIVNNTVYDPLQPELDSFKEELDKYFKNHTSPD |
| | VDLGDISGINASVVNIQKEIDRLNEVAKNLNESLIDLQELGKYE |
| | QYIKWPWYIWLGFIAGLIAIVMVTIMLCCMTSCCSCLKGCCSC |
| | GSCCKFDEDDSEPVLKGVALAYT |
| Optimized nucleotide | (SEQ ID NO: 126) |
| sequence encoding a | ATGTTCCTGCTGACAACAAAAAGAACCATGTTTGTGTTCCT |
| SARS-CoV-2 S protein | GGTGCTGCTGCCTCTGGTGTCCTCACAGTGTGTCAACCTGA |
| mutated to remove a | CAACAAGAACTCAGCTGCCACCAGCCTACACCAACTCCTTC |
| furin cleavage site, to | ACCAGAGGCGTGTATTACCCAGACAAGGTGTTTAGAAGCA |
| replace residues 986 and | GCGTGCTGCACTCTACCCAGGACCTCTTTCTGCCCTTTTTCA |
| 987 with proline, to | GCAACGTGACATGGTTTCACGCAATTCACGTGTCCGGCACT |
| mutate the ER retrieval | AATGGCACAAAGCGGTTCGACAATCCAGTCCTGCCTTTCAA |
| signal and which | CGATGGCGTCTACTTTGCATCTACTGAGAAATCCAATATCA |
| contains an extended | TTAGGGGATGGATCTTCGGCACAACCCTGGATTCTAAGACC |
| signal sequence | CAGAGCCTGCTGATCGTCAACAACGCCACAAACGTGGTCA |
| | TTAAGGTTTGCGAGTTTCAGTTCTGTAACGATCCTTTTCTGG |
| | GCGTGTATTATCATAAGAACAATAAGAGCTGGATGGAGTC |
| | CGAGTTTAGAGTGTATAGCTCTGCAAATAATTGTACCTTTG |
| | AGTACGTGAGCCAGCCCTTTCTGATGGACCTGGAGGGAAA |
| | ACAAGGAAACTTCAAAAACCTGCGGGAATTCGTTTTCAAA |
| | AACATCGACGGCTATTTCAAGATCTATAGCAAGCATACCCC |
| | AATCAACCTCGTGAGGGACCTCCCCCAGGGCTTTAGCGCAC |
| | TGGAGCCACTGGTTGACCTGCCTATCGGCATTAATATCACA |
| | AGATTTCAGACCCTGCTGGCACTGCATAGAAGCTATCTGAC |
| | CCCTGGAGACTCCTCTAGTGGGTGGACTGCCGGCGCCGCTG |
| | CCTACTATGTGGGCTATCTGCAGCCACGGACATTCCTGCTG |
| | AAATACAATGAGAACGGGACAATCACAGATGCTGTTGATT |
| | GCGCACTCGACCCCCTGTCCGAGACAAAGTGCACTCTCAAG |
| | AGCTTTACCGTCGAGAAGGGCATCTATCAGACCTCAAACTT |
| | CAGGGTGCAGCCCACAGAATCTATCGTGCGCTTCCCTAATA |
| | TCACTAACCTGTGTCCTTTCGGTGAAGTGTTCAACGCCACC |
| | AGGTTTGCTAGCGTGTATGCCTGGAACAGGAAGAGGATCT |
| | CTAACTGCGTCGCCGACTATTCCGTGCTGTATAACAGCGCC |
| | TCCTTCTCCACATTCAAATGCTATGGAGTGAGCCCGACAAA |
| | ACTGAACGATCTCTGCTTTACAAATGTCTACGCCGACTCTT |
| | TTGTGATCAGAGGGGACGAGGTCCGGCAGATCGCACCAGG |
| | ACAGACAGGCAAGATTGCTGACTACAACTATAAGCTGCCT |
| | GACGACTTCACAGGATGTGTGATCGCATGGAACTCAAACA |
| | ATCTGGACTCCAAAGTCGGGGGCAACTATAATTACCTGTAT |
| | CGCCTGTTCCGGAAGTCCAACCTGAAGCCCTTCGAGAGGG |
| | ACATCAGTACAGAGATCTATCAGGCTGGCTCCACCCCTTGC |
| | AATGGCGTCGAAGGCTTTAATTGTTATTTTCCCCTGCAGTCT |
| | TACGGGTTTCAGCCTACTAATGGAGTTGGGTACCAGCCATA |
| | CAGAGTGGTCGTGCTCAGCTTCGAGCTCCTGCATGCTCCAG |
| | CTACAGTTTGCGGGCCAAAGAAGTCCACTAACCTGGTGAA |
| | GAATAAGTGCGTCAACTTCAACTTTAACGGGCTCACCGGCA |
| | CCGGCGTGCTGACTGAGAGCAACAAGAAGTTTCTGCCATTT |
| | CAACAGTTTGGACGGGACATTGCCGACACCACCGATGCCG |
| | TTCGGGATCCACAGACCCTGGAAATTCTGGACATTACACCG |
| | TGCAGCTTCGGGGGCGTGAGCGTGATCACACCCGGAACCA |
| | ATACAAGCAACCAGGTTGCCGTCCTGTATCAGGATGTCAAT |
| | TGCACAGAAGTGCCAGTTGCTATCCACGCAGACCAGCTGA |
| | CTCCCACATGGCGGGTGTATAGCACCGGATCCAACGTGTTT |
| | CAGACCCGCGCCGGATGTCTCATTGGGGCCGAGCACGTGA |
| | ATAACAGCTACGAGTGCGACATCCCCATTGGCGCCGGCATT |
| | TGTGCGTCTTACCAGACTCAGACCAACTCTCCTGGCTCCGC |
| | CTCTTCCGTTGCTAGTCAGTCTATTATTGCCTATACCATGAG |
| | CCTCGGAGCTGAGAATAGCGTGGCCTACTCCAATAATTCCA |
| | TCGCAATCCCTACTAACTTCACTATTTCTGTGACCACCGAG |
| | ATCCTGCCTGTGTCTATGACTAAGACTAGCGTTGATTGTAC |
| | CATGTATATTTGTGGCGACTCTACCGAATGTTCTAACCTGC |
| | TGCTTCAGTACGGCTCATTTTGCACACAGCTGAACAGAGCC |
| | CTGACTGGGATCGCTGTGGAGCAGGACAAGAACACACAGG |
| | AGGTGTTTGCACAGGTGAAGCAGATCTATAAGACCCCTCCT |
| | ATTAAGGATTTCGGCGGATTCAATTTCTCACAGATTCTGCC |
| | AGACCCCAGTAAGCCTTCCAAGAGGAGCTTCATCGAGGAT |
| | CTCCTGTTTAACAAGGTGACCCTGGCAGACGCCGGCTTTAT |
| | TAAGCAATATGGGGATTGCCTGGGCGACATTGCTGCCAGA |
| | GACCTGATTTGCGCCCAGAAATTCAATGGCCTCACAGTGCT |
| | GCCACCTCTGCTGACCGACGAGATGATCGCTCAATACACTA |
| | GCGCACTGCTGGCCGGAACCATCACATCAGGCTGGACCTTC |
| | GGGGCCGGAGCAGCACTGCAGATTCCATTCGCCATGCAGA |
| | TGGCCTATAGATTCAACGGCATTGGCGTCACACAGAACGTG |
| | CTGTACGAAAACCAGAAGCTCATCGCTAACCAGTTTAATTC |
| | CGCAATTGGAAAGATCCAAGATTCACTCAGCTCAACCGCCT |
| | CTGCACTCGGAAAGCTGCAGGACGTGGTCAACCAGAATGC |
| | TCAGGCCCTGAACACACTCGTCAAGCAGCTGTCCTCTAACT |
| | TTGGCGCTATCAGCTCCGTTCTGAACGACATTCTGAGCCGC |
| | CTGGATCCCCCAGAGGCTGAAGTCCAGATTGACCGCCTGAT |
| | TACCGGCCGGCTGCAGTCTCTGCAAACATACGTGACCCAGC |
| | AGCTGATCAGAGCAGCCGAGATCCGGGCATCCGCAAATCT |
| | GGCAGCAACTAAGATGAGCGAATGCGTGCTGGGCCAGTCC |
| | AAGCGGGTGGACTTTTGTGGCAAGGGCTACCACCTGATGA |
| | GCTTCCCCCAGAGCGCCCCACATGGCGTTGTTTTTCTGCAC |
| | GTGACCTATGTCCCTGCTCAGGAAAAGAACTTTACAACTGC |
| | TCCTGCTATCTGCCATGACGGCAAGGCCCACTTCCCACGGG |
| | AGGGAGTGTTTGTGTCCAATGGCACACACTGGTTCGTGACC |
| | CAGAGGAACTTCTATGAACCCCAGATCATCACCACTGACA |
| | ATACCTTCGTGTCTGGAAATTGCGACGTCGTGATCGGCATC |
| | GTTAACAACACCGTGTACGACCCTCTCCAGCCAGAGCTGGA |
| | CTCCTTTAAGGAGGAACTGGATAAGTATTTTAAGAACCACA |
| | CAAGCCCAGATGTGGATCTCGGGGACATCTCCGGAATTAA |
| | CGCCTCCGTGGTGAATATCCAGAAGGAGATTGACCGCCTA |
| | AATGAAGTTGCCAAGAACCTCAATGAGTCTCTGATTGATCT |
| | GCAGGAACTGGGCAAGTATGAGCAGTATATCAAATGGCCC |
| | TGGTACATTTGGCTGGGGTTTATCGCCGGACTGATTGCCAT |
| | CGTCATGGTGACCATCATGCTGTGTTGCATGACCTCCTGTT |
| | GTTCCTGTCTGAAGGGCTGCTGTAGTTGCGGCTCTTGCTGT |
| | AAATTCGACGAAGATGATAGCGAGCCCGTGCTGAAGGGCG |
| | TGGCCCTGGCTTATACCTGA |
| SARS-CoV-2 S protein | (SEQ ID NO: 127) |
| mutated to remove a | MFLLTTKRTMFVFLVLLPLVSSQCVNLTTRTQLPPAYTNSFTRGVYYPD |
| furin cleavage site, to | KVFRSSVLHSTQDLFLPFFSNVTWFHAIHVSGTNGTKRFDNPV |
| replace residues 986 and | LPFNDGVYFASTEKSNIIRGWIFGTTLDSKTQSLLIVNNATNVV |
| 987 with proline, to | IKVCEFQFCNDPFLGVYYHKNNKSWMESEFRVYSSANNCTFE |
| mutate the ER retrieval | YVSQPFLMDLEGKQGNFKNLREFVFKNIDGYFKIYSKHTPINL |
| signal and which | VRDLPQGFSALEPLVDLPIGINITRFQTLLALHRSYLTPGDSSSG |
| contains an extended | WTAGAAAYYVGYLQPRTFLLKYNENGTITDAVDCALDPLSET |
| signal sequence | KCTLKSFTVEKGIYQTSNFRVQPTESIVRFPNITNLCPFGEVFN |
| | ATRFASVYAWNRKRISNCVADYSVLYNSASFSTFKCYGVSPT |
| | KLNDLCFTNVYADSFVIRGDEVRQIAPGQTGKIADYNYKLPD |
| | DFTGCVIAWNSNNLDSKVGGNYNYLYRLFRKSNLKPFERDIS |
| | TEIYQAGSTPCNGVEGFNCYFPLQSYGFQPTNGVGYQPYRVV |
| | VLSFELLHAPATVCGPKKSTNLVKNKCVNFNFNGLTGTGVLT |
| | ESNKKFLPFQQFGRDIADTTDAVRDPQTLEILDITPCSFGGVSV |
| | ITPGTNTSNQVAVLYQDVNCTEVPVAIHADQLTPTWRVYSTG |
| | SNVFQTRAGCLIGAEHVNNSYECDIPIGAGICASYQTQTNSPGS |
| | ASSVASQSIIAYTMSLGAENSVAYSNNSIAIPTNFTISVTTEILPV |
| | SMTKTSVDCTMYICGDSTECSNLLLQYGSFCTQLNRALTGIAV |
| | EQDKNTQEVFAQVKQIYKTPPIKDFGGFNFSQILPDPSKPSKRS |
| | FIEDLLFNKVTLADAGFIKQYGDCLGDIAARDLICAQKFNGLT |
| | VLPPLLTDEMIAQYTSALLAGTITSGWTFGAGAALQIPFAMQ |
| | MAYRFNGIGVTQNVLYENQKLIANQFNSAIGKIQDSLSSTASA |
| | LGKLQDVVNQNAQALNTLVKQLSSNFGAISSVLNDILSRLDPP |
| | EAEVQIDRLITGRLQSLQTYVTQQLIRAAEIRASANLAATKMS |
| | ECVLGQSKRVDFCGKGYHLMSFPQSAPHGVVFLHVTYVPAQ |
| | EKNFTTAPAICHDGKAHFPREGVFVSNGTHWFVTQRNFYEPQI |
| | ITTDNTFVSGNCDVVIGIVNNTVYDPLQPELDSFKEELDKYFK |
| | NHTSPDVDLGDISGINASVVNIQKEIDRLNEVAKNLNESLIDLQ |
| | ELGKYEQYIKWPWYIWLGFIAGLIAIVMVTIMLCCMTSCCSCL |
| | KGCCSCGSCCKFDEDDSEPVLKGVALAYT |
| Optimized nucleotide | (SEQ ID NO: 128) |
| sequence encoding a | ATGTTCGTCTTCCTCGTGCTGCTCCCACTCGTTTCTTCCCAG |
| SARS-CoV-2 S protein | TGTGTCAACCTGACAACTAGGACTCAGCTGCCACCAGCCTA |
| mutated to replace | CACCAACTCCTTCACCAGAGGCGTGTATTACCCAGACAAGG |
| residues 817, 892, 899, | TGTTTAGAAGCAGCGTGCTGCACTCTACCCAGGACCTCTTT |
| 942, 986 and 987 with | CTGCCCTTTTTCAGCAACGTGACATGGTTTCACGCAATTCA |
| proline | CGTGTCCGGCACTAATGGCACAAAGCGGTTCGACAATCCA |
| | GTCCTGCCTTTCAACGATGGCGTCTACTTTGCATCTACTGA |
| | GAAATCCAATATCATTAGGGGATGGATCTTCGGCACAACCC |
| | TGGATTCTAAGACCCAGAGCCTGCTGATCGTCAACAACGCC |
| | ACAAACGTGGTCATTAAGGTTTGCGAGTTTCAGTTCTGTAA |
| | CGATCCTTTTCTGGGCGTGTATTATCATAAGAACAATAAGA |
| | GCTGGATGGAGTCCGAGTTTAGAGTGTATAGCTCTGCAAAT |
| | AATTGTACCTTTGAGTACGTGAGCCAGCCCTTTCTGATGGA |
| | CCTGGAGGGAAAACAAGGAAACTTCAAAAACCTGCGGGAA |
| | TTCGTTTTCAAAAACATCGACGGCTATTTCAAGATCTATAG |
| | CAAGCATACCCCAATCAACCTCGTGAGGGACCTCCCCCAG |
| | GGCTTTAGCGCACTGGAGCCACTGGTTGACCTGCCTATCGG |
| | CATTAATATCACAAGATTTCAGACCCTGCTGGCACTGCATA |
| | GAAGCTATCTGACCCCTGGAGACTCCTCTAGTGGGTGGACT |
| | GCCGGCGCCGCTGCCTACTATGTGGGCTATCTGCAGCCACG |
| | GACATTCCTGCTGAAATACAATGAGAACGGGACAATCACA |
| | GATGCTGTTGATTGCGCACTCGACCCCCTGTCCGAGACAAA |
| | GTGCACTCTCAAGAGCTTTACCGTCGAGAAGGGCATCTATC |
| | AGACCTCAAACTTCAGGGTGCAGCCCACAGAATCTATCGTG |
| | CGCTTCCCTAATATCACTAACCTGTGTCCTTTCGGTGAAGT |
| | GTTCAACGCCACCAGGTTTGCTAGCGTGTATGCCTGGAACA |
| | GGAAGAGGATCTCTAACTGCGTCGCCGACTATTCCGTGCTG |
| | TATAACAGCGCCTCCTTCTCCACATTCAAATGCTATGGAGT |
| | GAGCCCGACAAAACTGAACGATCTCTGCTTTACAAATGTCT |
| | ACGCCGACTCTTTTGTGATCAGAGGGGACGAGGTCCGGCA |
| | GATCGCACCAGGACAGACAGGCAAGATTGCTGACTACAAC |
| | TATAAGCTGCCTGACGACTTCACAGGATGTGTGATCGCATG |
| | GAACTCAAACAATCTGGACTCCAAAGTCGGGGGCAACTAT |
| | AATTACCTGTATCGCCTGTTCCGGAAGTCCAACCTGAAGCC |
| | CTTCGAGAGGGACATCAGTACAGAGATCTATCAGGCTGGC |
| | TCCACCCCTTGCAATGGCGTCGAAGGCTTTAATTGTTATTTT |
| | CCCCTGCAGTCTTACGGGTTTCAGCCTACTAATGGAGTTGG |
| | GTACCAGCCATACAGAGTGGTCGTGCTCAGCTTCGAGCTCC |
| | TGCATGCTCCAGCTACAGTTTGCGGGCCAAAGAAGTCCACT |
| | AACCTGGTGAAGAATAAGTGCGTCAACTTCAACTTTAACGG |
| | GCTCACCGGCACCGGCGTGCTGACTGAGAGCAACAAGAAG |
| | TTTCTGCCATTTCAACAGTTTGGACGGGACATTGCCGACAC |
| | CACCGATGCCGTTCGGGATCCACAGACCCTGGAAATTCTGG |
| | ACATTACACCGTGCAGCTTCGGGGGCGTGAGCGTGATCAC |
| | ACCCGGAACCAATACAAGCAACCAGGTTGCCGTCCTGTATC |
| | AGGATGTCAATTGCACAGAAGTGCCAGTTGCTATCCACGCA |
| | GACCAGCTGACTCCCACATGGCGGGTGTATAGCACCGGAT |
| | CCAACGTGTTTCAGACCCGCGCCGGATGTCTCATTGGGGCC |
| | GAGCACGTGAATAACAGCTACGAGTGCGACATCCCCATTG |
| | GCGCCGGCATTTGTGCGTCTTACCAGACTCAGACCAACTCT |
| | CCTAGAAGGGCCAGGTCCGTTGCTAGTCAGTCTATTATTGC |
| | CTATACCATGAGCCTCGGAGCTGAGAATAGCGTGGCCTACT |
| | CCAATAATTCCATCGCAATCCCTACTAACTTCACTATTTCTG |
| | TGACCACCGAGATCCTGCCTGTGTCTATGACTAAGACTAGC |
| | GTTGATTGTACCATGTATATTTGTGGCGACTCTACCGAATG |
| | TTCTAACCTGCTGCTTCAGTACGGCTCATTTTGCACACAGCT |
| | GAACAGAGCCCTGACTGGGATCGCTGTGGAGCAGGACAAG |
| | AACACACAGGAGGTGTTTGCACAGGTGAAGCAGATCTATA |
| | AGACCCCTCCTATTAAGGATTTCGGCGGATTCAATTTCTCA |
| | CAGATTCTGCCAGACCCCAGTAAGCCTTCCAAGAGGAGCC |
| | CTATCGAGGATCTCCTGTTTAACAAGGTGACCCTGGCAGAC |
| | GCCGGCTTTATTAAGCAATATGGGGATTGCCTGGGCGACAT |
| | TGCTGCCAGAGACCTGATTTGCGCCCAGAAATTCAATGGCC |
| | TCACAGTGCTGCCACCTCTGCTGACCGACGAGATGATCGCT |
| | CAATACACTAGCGCACTGCTGGCCGGAACCATCACATCAG |
| | GCTGGACCTTCGGGGCCGGACCAGCACTGCAGATTCCATTC |
| | CCTATGCAGATGGCCTATAGATTCAACGGCATTGGCGTCAC |
| | ACAGAACGTGCTGTACGAAAACCAGAAGCTCATCGCTAAC |
| | CAGTTTAATTCCGCAATTGGAAAGATCCAAGATTCACTCAG |
| | CTCAACCCCCTCTGCACTCGGAAAGCTGCAGGACGTGGTCA |
| | ACCAGAATGCTCAGGCCCTGAACACACTCGTCAAGCAGCT |
| | GTCCTCTAACTTTGGCGCTATCAGCTCCGTTCTGAACGACA |
| | TTCTGAGCCGCCTGGATCCCCCAGAGGCTGAAGTCCAGATT |
| | GACCGCCTGATTACCGGCCGGCTGCAGTCTCTGCAAACATA |
| | CGTGACCCAGCAGCTGATCAGAGCAGCCGAGATCCGGGCA |
| | TCCGCAAATCTGGCAGCAACTAAGATGAGCGAATGCGTGC |
| | TGGGCCAGTCCAAGCGGGTGGACTTTTGTGGCAAGGGCTA |
| | CCACCTGATGAGCTTCCCCCAGAGCGCCCCACATGGCGTTG |
| | TTTTTCTGCACGTGACCTATGTCCCTGCTCAGGAAAAGAAC |
| | TTTACAACTGCTCCTGCTATCTGCCATGACGGCAAGGCCCA |
| | CTTCCCACGGGAGGGAGTGTTTGTGTCCAATGGCACACACT |
| | GGTTCGTGACCCAGAGGAACTTCTATGAACCCCAGATCATC |
| | ACCACTGACAATACCTTCGTGTCTGGAAATTGCGACGTCGT |
| | GATCGGCATCGTTAACAACACCGTGTACGACCCTCTCCAGC |
| | CAGAGCTGGACTCCTTTAAGGAGGAACTGGATAAGTATTTT |
| | AAGAACCACACAAGCCCAGATGTGGATCTCGGGGACATCT |
| | CCGGAATTAACGCCTCCGTGGTGAATATCCAGAAGGAGAT |
| | TGACCGCCTAAATGAAGTTGCCAAGAACCTCAATGAGTCTC |
| | TGATTGATCTGCAGGAACTGGGCAAGTATGAGCAGTATATC |
| | AAATGGCCCTGGTACATTTGGCTGGGGTTTATCGCCGGACT |
| | GATTGCCATCGTCATGGTGACCATCATGCTGTGTTGCATGA |
| | CCTCCTGTTGTTCCTGTCTGAAGGGCTGCTGTAGTTGCGGCT |
| | CTTGCTGTAAATTCGACGAAGATGATAGCGAGCCCGTGCTG |
| | AAGGGCGTGAAGCTGCATTATACCTGA |
| SARS-CoV-2 S protein | (SEQ ID NO: 129) |
| mutated to replace | MFVFLVLLPLVSSQCVNLTTRTQLPPAYTNSFTRGVYYPDKVF |
| residues 817, 892, 899, | RSSVLHSTQDLFLPFFSNVTWFHAIHVSGTNGTKRFDNPVLPF |
| 942, 986 and 987 with | NDGVYFASTEKSNIIRGWIFGTTLDSKTQSLLIVNNATNVVIKV |
| proline | CEFQFCNDPFLGVYYHKNNKSWMESEFRVYSSANNCTFEYVS |
| | QPFLMDLEGKQGNFKNLREFVFKNIDGYFKIYSKHTPINLVRD |
| | LPQGFSALEPLVDLPIGINITRFQTLLALHRSYLTPGDSSSGWT |
| | AGAAAYYVGYLQPRTFLLKYNENGTITDAVDCALDPLSETKC |
| | TLKSFTVEKGIYQTSNFRVQPTESIVRFPNITNLCPFGEVFNATR |
| | FASVYAWNRKRISNCVADYSVLYNSASFSTFKCYGVSPTKLN |
| | DLCFTNVYADSFVIRGDEVRQIAPGQTGKIADYNYKLPDDFTG |
| | CVIAWNSNNLDSKVGGNYNYLYRLFRKSNLKPFERDISTEIYQ |
| | AGSTPCNGVEGFNCYFPLQSYGFQPTNGVGYQPYRVVVLSFE |
| | LLHAPATVCGPKKSTNLVKNKCVNFNFNGLTGTGVLTESNKK |
| | FLPFQQFGRDIADTTDAVRDPQTLEILDITPCSFGGVSVITPGTN |
| | TSNQVAVLYQDVNCTEVPVAIHADQLTPTWRVYSTGSNVFQT |
| | RAGCLIGAEHVNNSYECDIPIGAGICASYQTQTNSPRRARSVA |
| | SQSIIAYTMSLGAENSVAYSNNSIAIPTNFTISVTTEILPVSMTK |
| | TSVDCTMYICGDSTECSNLLLQYGSFCTQLNRALTGIAVEQDK |
| | NTQEVFAQVKQIYKTPPIKDFGGFNFSQILPDPSKPSKRSPIEDL |
| | LFNKVTLADAGFIKQYGDCLGDIAARDLICAQKFNGLTVLPPL |
| | LTDEMIAQYTSALLAGTITSGWTFGAGPALQIPFPMQMAYRF |
| | NGIGVTQNVLYENQKLIANQFNSAIGKIQDSLSSTPSALGKLQ |
| | DVVNQNAQALNTLVKQLSSNFGAISSVLNDILSRLDPPEAEVQ |
| | IDRLITGRLQSLQTYVTQQLIRAAEIRASANLAATKMSECVLG |
| | QSKRVDFCGKGYHLMSFPQSAPHGVVFLHVTYVPAQEKNFTT |
| | APAICHDGKAHFPREGVFVSNGTHWFVTQRNFYEPQIITTDNT |
| | FVSGNCDVVIGIVNNTVYDPLQPELDSFKEELDKYFKNHTSPD |
| | VDLGDISGINASVVNIQKEIDRLNEVAKNLNESLIDLQELGKYE |
| | QYIKWPWYIWLGFIAGLIAIVMVTIMLCCMTSCCSCLKGCCSC |
| | GSCCKFDEDDSEPVLKGVKLHYT |
| Optimized nucleotide | (SEQ ID NO: 130) |
| sequence encoding a | ATGTTCGTCTTCCTCGTGCTGCTCCCACTCGTTTCTTCCCAG |
| SARS-CoV-2 S protein | TGTGTCAACCTGACAACTAGGACTCAGCTGCCACCAGCCTA |
| mutated to remove a | CACCAACTCCTTCACCAGAGGCGTGTATTACCCAGACAAGG |
| furin cleavage site and | TGTTTAGAAGCAGCGTGCTGCACTCTACCCAGGACCTCTTT |
| to replace residues 817, | CTGCCCTTTTTCAGCAACGTGACATGGTTTCACGCAATTCA |
| 892, 899, 942, 986 and | CGTGTCCGGCACTAATGGCACAAAGCGGTTCGACAATCCA |
| 987 with proline | GTCCTGCCTTTCAACGATGGCGTCTACTTTGCATCTACTGA |
| | GAAATCCAATATCATTAGGGGATGGATCTTCGGCACAACCC |
| | TGGATTCTAAGACCCAGAGCCTGCTGATCGTCAACAACGCC |
| | ACAAACGTGGTCATTAAGGTTTGCGAGTTTCAGTTCTGTAA |
| | CGATCCTTTTCTGGGCGTGTATTATCATAAGAACAATAAGA |
| | GCTGGATGGAGTCCGAGTTTAGAGTGTATAGCTCTGCAAAT |
| | AATTGTACCTTTGAGTACGTGAGCCAGCCCTTTCTGATGGA |
| | CCTGGAGGGAAAACAAGGAAACTTCAAAAACCTGCGGGAA |
| | TTCGTTTTCAAAAACATCGACGGCTATTTCAAGATCTATAG |
| | CAAGCATACCCCAATCAACCTCGTGAGGGACCTCCCCCAG |
| | GGCTTTAGCGCACTGGAGCCACTGGTTGACCTGCCTATCGG |
| | CATTAATATCACAAGATTTCAGACCCTGCTGGCACTGCATA |
| | GAAGCTATCTGACCCCTGGAGACTCCTCTAGTGGGTGGACT |
| | GCCGGCGCCGCTGCCTACTATGTGGGCTATCTGCAGCCACG |
| | GACATTCCTGCTGAAATACAATGAGAACGGGACAATCACA |
| | GATGCTGTTGATTGCGCACTCGACCCCCTGTCCGAGACAAA |
| | GTGCACTCTCAAGAGCTTTACCGTCGAGAAGGGCATCTATC |
| | AGACCTCAAACTTCAGGGTGCAGCCCACAGAATCTATCGTG |
| | CGCTTCCCTAATATCACTAACCTGTGTCCTTTCGGTGAAGT |
| | GTTCAACGCCACCAGGTTTGCTAGCGTGTATGCCTGGAACA |
| | GGAAGAGGATCTCTAACTGCGTCGCCGACTATTCCGTGCTG |
| | TATAACAGCGCCTCCTTCTCCACATTCAAATGCTATGGAGT |
| | GAGCCCGACAAAACTGAACGATCTCTGCTTTACAAATGTCT |
| | ACGCCGACTCTTTTGTGATCAGAGGGGACGAGGTCCGGCA |
| | GATCGCACCAGGACAGACAGGCAAGATTGCTGACTACAAC |
| | TATAAGCTGCCTGACGACTTCACAGGATGTGTGATCGCATG |
| | GAACTCAAACAATCTGGACTCCAAAGTCGGGGGCAACTAT |
| | AATTACCTGTATCGCCTGTTCCGGAAGTCCAACCTGAAGCC |
| | CTTCGAGAGGGACATCAGTACAGAGATCTATCAGGCTGGC |
| | TCCACCCCTTGCAATGGCGTCGAAGGCTTTAATTGTTATTTT |
| | CCCCTGCAGTCTTACGGGTTTCAGCCTACTAATGGAGTTGG |
| | GTACCAGCCATACAGAGTGGTCGTGCTCAGCTTCGAGCTCC |
| | TGCATGCTCCAGCTACAGTTTGCGGGCCAAAGAAGTCCACT |
| | AACCTGGTGAAGAATAAGTGCGTCAACTTCAACTTTAACGG |
| | GCTCACCGGCACCGGCGTGCTGACTGAGAGCAACAAGAAG |
| | TTTCTGCCATTTCAACAGTTTGGACGGGACATTGCCGACAC |
| | CACCGATGCCGTTCGGGATCCACAGACCCTGGAAATTCTGG |
| | ACATTACACCGTGCAGCTTCGGGGGCGTGAGCGTGATCAC |
| | ACCCGGAACCAATACAAGCAACCAGGTTGCCGTCCTGTATC |
| | AGGATGTCAATTGCACAGAAGTGCCAGTTGCTATCCACGCA |
| | GACCAGCTGACTCCCACATGGCGGGTGTATAGCACCGGAT |
| | CCAACGTGTTTCAGACCCGCGCCGGATGTCTCATTGGGGCC |
| | GAGCACGTGAATAACAGCTACGAGTGCGACATCCCCATTG |
| | GCGCCGGCATTTGTGCGTCTTACCAGACTCAGACCAACTCT |
| | CCTGGCTCCGCCTCTTCCGTTGCTAGTCAGTCTATTATTGCC |
| | TATACCATGAGCCTCGGAGCTGAGAATAGCGTGGCCTACTC |
| | CAATAATTCCATCGCAATCCCTACTAACTTCACTATTTCTGT |
| | GACCACCGAGATCCTGCCTGTGTCTATGACTAAGACTAGCG |
| | TTGATTGTACCATGTATATTTGTGGCGACTCTACCGAATGTT |
| | CTAACCTGCTGCTTCAGTACGGCTCATTTTGCACACAGCTG |
| | AACAGAGCCCTGACTGGGATCGCTGTGGAGCAGGACAAGA |
| | ACACACAGGAGGTGTTTGCACAGGTGAAGCAGATCTATAA |
| | GACCCCTCCTATTAAGGATTTCGGCGGATTCAATTTCTCAC |
| | AGATTCTGCCAGACCCCAGTAAGCCTTCCAAGAGGAGCCCT |
| | ATCGAGGATCTCCTGTTTAACAAGGTGACCCTGGCAGACGC |
| | CGGCTTTATTAAGCAATATGGGGATTGCCTGGGCGACATTG |
| | CTGCCAGAGACCTGATTTGCGCCCAGAAATTCAATGGCCTC |
| | ACAGTGCTGCCACCTCTGCTGACCGACGAGATGATCGCTCA |
| | ATACACTAGCGCACTGCTGGCCGGAACCATCACATCAGGCT |
| | GGACCTTCGGGGCCGGACCAGCACTGCAGATTCCATTCCCT |
| | ATGCAGATGGCCTATAGATTCAACGGCATTGGCGTCACACA |
| | GAACGTGCTGTACGAAAACCAGAAGCTCATCGCTAACCAG |
| | TTTAATTCCGCAATTGGAAAGATCCAAGATTCACTCAGCTC |
| | AACCCCCTCTGCACTCGGAAAGCTGCAGGACGTGGTCAAC |
| | CAGAATGCTCAGGCCCTGAACACACTCGTCAAGCAGCTGTC |
| | CTCTAACTTTGGCGCTATCAGCTCCGTTCTGAACGACATTCT |
| | GAGCCGCCTGGATCCCCCAGAGGCTGAAGTCCAGATTGAC |
| | CGCCTGATTACCGGCCGGCTGCAGTCTCTGCAAACATACGT |
| | GACCCAGCAGCTGATCAGAGCAGCCGAGATCCGGGCATCC |
| | GCAAATCTGGCAGCAACTAAGATGAGCGAATGCGTGCTGG |
| | GCCAGTCCAAGCGGGTGGACTTTTGTGGCAAGGGCTACCA |
| | CCTGATGAGCTTCCCCCAGAGCGCCCCACATGGCGTTGTTT |
| | TTCTGCACGTGACCTATGTCCCTGCTCAGGAAAAGAACTTT |
| | ACAACTGCTCCTGCTATCTGCCATGACGGCAAGGCCCACTT |
| | CCCACGGGAGGGAGTGTTTGTGTCCAATGGCACACACTGGT |
| | TCGTGACCCAGAGGAACTTCTATGAACCCCAGATCATCACC |
| | ACTGACAATACCTTCGTGTCTGGAAATTGCGACGTCGTGAT |
| | CGGCATCGTTAACAACACCGTGTACGACCCTCTCCAGCCAG |
| | AGCTGGACTCCTTTAAGGAGGAACTGGATAAGTATTTTAAG |
| | AACCACACAAGCCCAGATGTGGATCTCGGGGACATCTCCG |
| | GAATTAACGCCTCCGTGGTGAATATCCAGAAGGAGATTGA |
| | CCGCCTAAATGAAGTTGCCAAGAACCTCAATGAGTCTCTGA |
| | TTGATCTGCAGGAACTGGGCAAGTATGAGCAGTATATCAA |
| | ATGGCCCTGGTACATTTGGCTGGGGTTTATCGCCGGACTGA |
| | TTGCCATCGTCATGGTGACCATCATGCTGTGTTGCATGACC |
| | TCCTGTTGTTCCTGTCTGAAGGGCTGCTGTAGTTGCGGCTCT |
| | TGCTGTAAATTCGACGAAGATGATAGCGAGCCCGTGCTGA |
| | AGGGCGTGAAGCTGCATTATACCTGA |
| SARS-CoV-2 S protein | (SEQ ID NO: 131) |
| mutated to remove a | MFVFLVLLPLVSSQCVNLTTRTQLPPAYTNSFTRGVYYPDKVF |
| furin cleavage site and | RSSVLHSTQDLFLPFFSNVTWFHAIHVSGTNGTKRFDNPVLPF |
| to replace residues 817, | NDGVYFASTEKSNIIRGWIFGTTLDSKTQSLLIVNNATNVVIKV |
| 892, 899, 942, 986 and | CEFQFCNDPFLGVYYHKNNKSWMESEFRVYSSANNCTFEYVS |
| 987 with proline | QPFLMDLEGKQGNFKNLREFVFKNIDGYFKIYSKHTPINLVRD |
| | LPQGFSALEPLVDLPIGINITRFQTLLALHRSYLTPGDSSSGWT |
| | AGAAAYYVGYLQPRTFLLKYNENGTITDAVDCALDPLSETKC |
| | TLKSFTVEKGIYQTSNFRVQPTESIVRFPNITNLCPFGEVFNATR |
| | FASVYAWNRKRISNCVADYSVLYNSASFSTFKCYGVSPTKLN |
| | DLCFTNVYADSFVIRGDEVRQIAPGQTGKIADYNYKLPDDFTG |
| | CVIAWNSNNLDSKVGGNYNYLYRLFRKSNLKPFERDISTEIYQ |
| | AGSTPCNGVEGFNCYFPLQSYGFQPTNGVGYQPYRVVVLSFE |
| | LLHAPATVCGPKKSTNLVKNKCVNFNFNGLTGTGVLTESNKK |
| | FLPFQQFGRDIADTTDAVRDPQTLEILDITPCSFGGVSVITPGTN |
| | TSNQVAVLYQDVNCTEVPVAIHADQLTPTWRVYSTGSNVFQT |
| | RAGCLIGAEHVNNSYECDIPIGAGICASYQTQTNSPGSASSVAS |
| | QSIIAYTMSLGAENSVAYSNNSIAIPTNFTISVTTEILPVSMTKT |
| | SVDCTMYICGDSTECSNLLLQYGSFCTQLNRALTGIAVEQDK |
| | NTQEVFAQVKQIYKTPPIKDFGGFNFSQILPDPSKPSKRSPIEDL |
| | LFNKVTLADAGFIKQYGDCLGDIAARDLICAQKFNGLTVLPPL |
| | LTDEMIAQYTSALLAGTITSGWTFGAGPALQIPFPMQMAYRF |
| | NGIGVTQNVLYENQKLIANQFNSAIGKIQDSLSSTPSALGKLQ |
| | DVVNQNAQALNTLVKQLSSNFGAISSVLNDILSRLDPPEAEVQ |
| | IDRLITGRLQSLQTYVTQQLIRAAEIRASANLAATKMSECVLG |
| | QSKRVDFCGKGYHLMSFPQSAPHGVVFLHVTYVPAQEKNFTT |
| | APAICHDGKAHFPREGVFVSNGTHWFVTQRNFYEPQIITTDNT |
| | FVSGNCDVVIGIVNNTVYDPLQPELDSFKEELDKYFKNHTSPD |
| | VDLGDISGINASVVNIQKEIDRLNEVAKNLNESLIDLQELGKYE |
| | QYIKWPWYIWLGFIAGLIAIVMVTIMLCCMTSCCSCLKGCCSC |
| | GSCCKFDEDDSEPVLKGVKLHYT |
| Optimized nucleotide | (SEQ ID NO: 132) |
| sequence encoding a | ATGTTCGTCTTCCTCGTGCTGCTCCCACTCGTTTCTTCCCAG |
| SARS-CoV-2 S protein | TGTGTCAACCTGACAACTAGGACTCAGCTGCCACCAGCCTA |
| mutated to replace | CACCAACTCCTTCACCAGAGGCGTGTATTACCCAGACAAGG |
| residues 817, 892, 899, | TGTTTAGAAGCAGCGTGCTGCACTCTACCCAGGACCTCTTT |
| 942, 986 and 987 with | CTGCCCTTTTTCAGCAACGTGACATGGTTTCACGCAATTCA |
| proline and which | CGTGTCCGGCACTAATGGCACAAAGCGGTTCGACAATCCA |
| contains the D614G | GTCCTGCCTTTCAACGATGGCGTCTACTTTGCATCTACTGA |
| mutation | GAAATCCAATATCATTAGGGGATGGATCTTCGGCACAACCC |
| | TGGATTCTAAGACCCAGAGCCTGCTGATCGTCAACAACGCC |
| | ACAAACGTGGTCATTAAGGTTTGCGAGTTTCAGTTCTGTAA |
| | CGATCCTTTTCTGGGCGTGTATTATCATAAGAACAATAAGA |
| | GCTGGATGGAGTCCGAGTTTAGAGTGTATAGCTCTGCAAAT |
| | AATTGTACCTTTGAGTACGTGAGCCAGCCCTTTCTGATGGA |
| | CCTGGAGGGAAAACAAGGAAACTTCAAAAACCTGCGGGAA |
| | TTCGTTTTCAAAAACATCGACGGCTATTTCAAGATCTATAG |
| | CAAGCATACCCCAATCAACCTCGTGAGGGACCTCCCCCAG |
| | GGCTTTAGCGCACTGGAGCCACTGGTTGACCTGCCTATCGG |
| | CATTAATATCACAAGATTTCAGACCCTGCTGGCACTGCATA |
| | GAAGCTATCTGACCCCTGGAGACTCCTCTAGTGGGTGGACT |
| | GCCGGCGCCGCTGCCTACTATGTGGGCTATCTGCAGCCACG |
| | GACATTCCTGCTGAAATACAATGAGAACGGGACAATCACA |
| | GATGCTGTTGATTGCGCACTCGACCCCCTGTCCGAGACAAA |
| | GTGCACTCTCAAGAGCTTTACCGTCGAGAAGGGCATCTATC |
| | AGACCTCAAACTTCAGGGTGCAGCCCACAGAATCTATCGTG |
| | CGCTTCCCTAATATCACTAACCTGTGTCCTTTCGGTGAAGT |
| | GTTCAACGCCACCAGGTTTGCTAGCGTGTATGCCTGGAACA |
| | GGAAGAGGATCTCTAACTGCGTCGCCGACTATTCCGTGCTG |
| | TATAACAGCGCCTCCTTCTCCACATTCAAATGCTATGGAGT |
| | GAGCCCGACAAAACTGAACGATCTCTGCTTTACAAATGTCT |
| | ACGCCGACTCTTTTGTGATCAGAGGGGACGAGGTCCGGCA |
| | GATCGCACCAGGACAGACAGGCAAGATTGCTGACTACAAC |
| | TATAAGCTGCCTGACGACTTCACAGGATGTGTGATCGCATG |
| | GAACTCAAACAATCTGGACTCCAAAGTCGGGGGCAACTAT |
| | AATTACCTGTATCGCCTGTTCCGGAAGTCCAACCTGAAGCC |
| | CTTCGAGAGGGACATCAGTACAGAGATCTATCAGGCTGGC |
| | TCCACCCCTTGCAATGGCGTCGAAGGCTTTAATTGTTATTTT |
| | CCCCTGCAGTCTTACGGGTTTCAGCCTACTAATGGAGTTGG |
| | GTACCAGCCATACAGAGTGGTCGTGCTCAGCTTCGAGCTCC |
| | TGCATGCTCCAGCTACAGTTTGCGGGCCAAAGAAGTCCACT |
| | AACCTGGTGAAGAATAAGTGCGTCAACTTCAACTTTAACGG |
| | GCTCACCGGCACCGGCGTGCTGACTGAGAGCAACAAGAAG |
| | TTTCTGCCATTTCAACAGTTTGGACGGGACATTGCCGACAC |
| | CACCGATGCCGTTCGGGATCCACAGACCCTGGAAATTCTGG |
| | ACATTACACCGTGCAGCTTCGGGGGCGTGAGCGTGATCAC |
| | ACCCGGAACCAATACAAGCAACCAGGTTGCCGTCCTGTATC |
| | AGGGCGTCAATTGCACAGAAGTGCCAGTTGCTATCCACGC |
| | AGACCAGCTGACTCCCACATGGCGGGTGTATAGCACCGGA |
| | TCCAACGTGTTTCAGACCCGCGCCGGATGTCTCATTGGGGC |
| | CGAGCACGTGAATAACAGCTACGAGTGCGACATCCCCATT |
| | GGCGCCGGCATTTGTGCGTCTTACCAGACTCAGACCAACTC |
| | TCCTAGAAGGGCCAGGTCCGTTGCTAGTCAGTCTATTATTG |
| | CCTATACCATGAGCCTCGGAGCTGAGAATAGCGTGGCCTAC |
| | TCCAATAATTCCATCGCAATCCCTACTAACTTCACTATTTCT |
| | GTGACCACCGAGATCCTGCCTGTGTCTATGACTAAGACTAG |
| | CGTTGATTGTACCATGTATATTTGTGGCGACTCTACCGAAT |
| | GTTCTAACCTGCTGCTTCAGTACGGCTCATTTTGCACACAG |
| | CTGAACAGAGCCCTGACTGGGATCGCTGTGGAGCAGGACA |
| | AGAACACACAGGAGGTGTTTGCACAGGTGAAGCAGATCTA |
| | TAAGACCCCTCCTATTAAGGATTTCGGCGGATTCAATTTCT |
| | CACAGATTCTGCCAGACCCCAGTAAGCCTTCCAAGAGGAG |
| | CCCTATCGAGGATCTCCTGTTTAACAAGGTGACCCTGGCAG |
| | ACGCCGGCTTTATTAAGCAATATGGGGATTGCCTGGGCGAC |
| | ATTGCTGCCAGAGACCTGATTTGCGCCCAGAAATTCAATGG |
| | CCTCACAGTGCTGCCACCTCTGCTGACCGACGAGATGATCG |
| | CTCAATACACTAGCGCACTGCTGGCCGGAACCATCACATCA |
| | GGCTGGACCTTCGGGGCCGGACCAGCACTGCAGATTCCATT |
| | CCCTATGCAGATGGCCTATAGATTCAACGGCATTGGCGTCA |
| | CACAGAACGTGCTGTACGAAAACCAGAAGCTCATCGCTAA |
| | CCAGTTTAATTCCGCAATTGGAAAGATCCAAGATTCACTCA |
| | GCTCAACCCCCTCTGCACTCGGAAAGCTGCAGGACGTGGTC |
| | AACCAGAATGCTCAGGCCCTGAACACACTCGTCAAGCAGC |
| | TGTCCTCTAACTTTGGCGCTATCAGCTCCGTTCTGAACGAC |
| | ATTCTGAGCCGCCTGGATCCCCCAGAGGCTGAAGTCCAGAT |
| | TGACCGCCTGATTACCGGCCGGCTGCAGTCTCTGCAAACAT |
| | ACGTGACCCAGCAGCTGATCAGAGCAGCCGAGATCCGGGC |
| | ATCCGCAAATCTGGCAGCAACTAAGATGAGCGAATGCGTG |
| | CTGGGCCAGTCCAAGCGGGTGGACTTTTGTGGCAAGGGCT |
| | ACCACCTGATGAGCTTCCCCCAGAGCGCCCCACATGGCGTT |
| | GTTTTTCTGCACGTGACCTATGTCCCTGCTCAGGAAAAGAA |
| | CTTTACAACTGCTCCTGCTATCTGCCATGACGGCAAGGCCC |
| | ACTTCCCACGGGAGGGAGTGTTTGTGTCCAATGGCACACAC |
| | TGGTTCGTGACCCAGAGGAACTTCTATGAACCCCAGATCAT |
| | CACCACTGACAATACCTTCGTGTCTGGAAATTGCGACGTCG |
| | TGATCGGCATCGTTAACAACACCGTGTACGACCCTCTCCAG |
| | CCAGAGCTGGACTCCTTTAAGGAGGAACTGGATAAGTATTT |
| | TAAGAACCACACAAGCCCAGATGTGGATCTCGGGGACATC |
| | TCCGGAATTAACGCCTCCGTGGTGAATATCCAGAAGGAGA |
| | TTGACCGCCTAAATGAAGTTGCCAAGAACCTCAATGAGTCT |
| | CTGATTGATCTGCAGGAACTGGGCAAGTATGAGCAGTATAT |
| | CAAATGGCCCTGGTACATTTGGCTGGGGTTTATCGCCGGAC |
| | TGATTGCCATCGTCATGGTGACCATCATGCTGTGTTGCATG |
| | ACCTCCTGTTGTTCCTGTCTGAAGGGCTGCTGTAGTTGCGG |
| | CTCTTGCTGTAAATTCGACGAAGATGATAGCGAGCCCGTGC |
| | TGAAGGGCGTGAAGCTGCATTATACCTGA |
| SARS-CoV-2 S protein | (SEQ ID NO: 133) |
| mutated to replace | MFVFLVLLPLVSSQCVNLTTRTQLPPAYTNSFTRGVYYPDKVF |
| residues 817, 892, 899, | RSSVLHSTQDLFLPFFSNVTWFHAIHVSGTNGTKRFDNPVLPF |
| 942, 986 and 987 with | NDGVYFASTEKSNIIRGWIFGTTLDSKTQSLLIVNNATNVVIKV |
| proline and which | CEFQFCNDPFLGVYYHKNNKSWMESEFRVYSSANNCTFEYVS |
| contains the D614G | QPFLMDLEGKQGNFKNLREFVFKNIDGYFKIYSKHTPINLVRD |
| mutation | LPQGFSALEPLVDLPIGINITRFQTLLALHRSYLTPGDSSSGWT |
| | AGAAAYYVGYLQPRTFLLKYNENGTITDAVDCALDPLSETKC |
| | TLKSFTVEKGIYQTSNFRVQPTESIVRFPNITNLCPFGEVFNATR |
| | FASVYAWNRKRISNCVADYSVLYNSASFSTFKCYGVSPTKLN |
| | DLCFTNVYADSFVIRGDEVRQIAPGQTGKIADYNYKLPDDFTG |
| | CVIAWNSNNLDSKVGGNYNYLYRLFRKSNLKPFERDISTEIYQ |
| | AGSTPCNGVEGFNCYFPLQSYGFQPTNGVGYQPYRVVVLSFE |
| | LLHAPATVCGPKKSTNLVKNKCVNFNFNGLTGTGVLTESNKK |
| | FLPFQQFGRDIADTTDAVRDPQTLEILDITPCSFGGVSVITPGTN |
| | TSNQVAVLYQGVNCTEVPVAIHADQLTPTWRVYSTGSNVFQ |
| | TRAGCLIGAEHVNNSYECDIPIGAGICASYQTQTNSPRRARSV |
| | ASQSIIAYTMSLGAENSVAYSNNSIAIPTNFTISVTTEILPVSMT |
| | KTSVDCTMYICGDSTECSNLLLQYGSFCTQLNRALTGIAVEQD |
| | KNTQEVFAQVKQIYKTPPIKDFGGFNFSQILPDPSKPSKRSPIED |
| | LLFNKVTLADAGFIKQYGDCLGDIAARDLICAQKENGLTVLPP |
| | LLTDEMIAQYTSALLAGTITSGWTFGAGPALQIPFPMQMAYR |
| | FNGIGVTQNVLYENQKLIANQFNSAIGKIQDSLSSTPSALGKLQ |
| | DVVNQNAQALNTLVKQLSSNFGAISSVLNDILSRLDPPEAEVQ |
| | IDRLITGRLQSLQTYVTQQLIRAAEIRASANLAATKMSECVLG |
| | QSKRVDFCGKGYHLMSFPQSAPHGVVFLHVTYVPAQEKNFTT |
| | APAICHDGKAHFPREGVFVSNGTHWFVTQRNFYEPQIITTDNT |
| | FVSGNCDVVIGIVNNTVYDPLQPELDSFKEELDKYFKNHTSPD |
| | VDLGDISGINASVVNIQKEIDRLNEVAKNLNESLIDLQELGKYE |
| | QYIKWPWYIWLGFIAGLIAIVMVTIMLCCMTSCCSCLKGCCSC |
| | GSCCKFDEDDSEPVLKGVKLHYT |
| Optimized nucleotide | (SEQ ID NO: 134) |
| sequence encoding a | ATGTTCGTCTTCCTCGTGCTGCTCCCACTCGTTTCTTCCCAG |
| SARS-CoV-2 S protein | TGTGTCAACCTGACAACTAGGACTCAGCTGCCACCAGCCTA |
| mutated to remove a | CACCAACTCCTTCACCAGAGGCGTGTATTACCCAGACAAGG |
| furin cleavage site, to | TGTTTAGAAGCAGCGTGCTGCACTCTACCCAGGACCTCTTT |
| replace residues 817, | CTGCCCTTTTTCAGCAACGTGACATGGTTTCACGCAATTCA |
| 892, 899, 942, 986 and | CGTGTCCGGCACTAATGGCACAAAGCGGTTCGACAATCCA |
| 987 with proline and | GTCCTGCCTTTCAACGATGGCGTCTACTTTGCATCTACTGA |
| which contains the | GAAATCCAATATCATTAGGGGATGGATCTTCGGCACAACCC |
| D614G mutation | TGGATTCTAAGACCCAGAGCCTGCTGATCGTCAACAACGCC |
| | ACAAACGTGGTCATTAAGGTTTGCGAGTTTCAGTTCTGTAA |
| | CGATCCTTTTCTGGGCGTGTATTATCATAAGAACAATAAGA |
| | GCTGGATGGAGTCCGAGTTTAGAGTGTATAGCTCTGCAAAT |
| | AATTGTACCTTTGAGTACGTGAGCCAGCCCTTTCTGATGGA |
| | CCTGGAGGGAAAACAAGGAAACTTCAAAAACCTGCGGGAA |
| | TTCGTTTTCAAAAACATCGACGGCTATTTCAAGATCTATAG |
| | CAAGCATACCCCAATCAACCTCGTGAGGGACCTCCCCCAG |
| | GGCTTTAGCGCACTGGAGCCACTGGTTGACCTGCCTATCGG |
| | CATTAATATCACAAGATTTCAGACCCTGCTGGCACTGCATA |
| | GAAGCTATCTGACCCCTGGAGACTCCTCTAGTGGGTGGACT |
| | GCCGGCGCCGCTGCCTACTATGTGGGCTATCTGCAGCCACG |
| | GACATTCCTGCTGAAATACAATGAGAACGGGACAATCACA |
| | GATGCTGTTGATTGCGCACTCGACCCCCTGTCCGAGACAAA |
| | GTGCACTCTCAAGAGCTTTACCGTCGAGAAGGGCATCTATC |
| | AGACCTCAAACTTCAGGGTGCAGCCCACAGAATCTATCGTG |
| | CGCTTCCCTAATATCACTAACCTGTGTCCTTTCGGTGAAGT |
| | GTTCAACGCCACCAGGTTTGCTAGCGTGTATGCCTGGAACA |
| | GGAAGAGGATCTCTAACTGCGTCGCCGACTATTCCGTGCTG |
| | TATAACAGCGCCTCCTTCTCCACATTCAAATGCTATGGAGT |
| | GAGCCCGACAAAACTGAACGATCTCTGCTTTACAAATGTCT |
| | ACGCCGACTCTTTTGTGATCAGAGGGGACGAGGTCCGGCA |
| | GATCGCACCAGGACAGACAGGCAAGATTGCTGACTACAAC |
| | TATAAGCTGCCTGACGACTTCACAGGATGTGTGATCGCATG |
| | GAACTCAAACAATCTGGACTCCAAAGTCGGGGGCAACTAT |
| | AATTACCTGTATCGCCTGTTCCGGAAGTCCAACCTGAAGCC |
| | CTTCGAGAGGGACATCAGTACAGAGATCTATCAGGCTGGC |
| | TCCACCCCTTGCAATGGCGTCGAAGGCTTTAATTGTTATTTT |
| | CCCCTGCAGTCTTACGGGTTTCAGCCTACTAATGGAGTTGG |
| | GTACCAGCCATACAGAGTGGTCGTGCTCAGCTTCGAGCTCC |
| | TGCATGCTCCAGCTACAGTTTGCGGGCCAAAGAAGTCCACT |
| | AACCTGGTGAAGAATAAGTGCGTCAACTTCAACTTTAACGG |
| | GCTCACCGGCACCGGCGTGCTGACTGAGAGCAACAAGAAG |
| | TTTCTGCCATTTCAACAGTTTGGACGGGACATTGCCGACAC |
| | CACCGATGCCGTTCGGGATCCACAGACCCTGGAAATTCTGG |
| | ACATTACACCGTGCAGCTTCGGGGGCGTGAGCGTGATCAC |
| | ACCCGGAACCAATACAAGCAACCAGGTTGCCGTCCTGTATC |
| | AGGGCGTCAATTGCACAGAAGTGCCAGTTGCTATCCACGC |
| | AGACCAGCTGACTCCCACATGGCGGGTGTATAGCACCGGA |
| | TCCAACGTGTTTCAGACCCGCGCCGGATGTCTCATTGGGGC |
| | CGAGCACGTGAATAACAGCTACGAGTGCGACATCCCCATT |
| | GGCGCCGGCATTTGTGCGTCTTACCAGACTCAGACCAACTC |
| | TCCTGGCTCCGCCTCTTCCGTTGCTAGTCAGTCTATTATTGC |
| | CTATACCATGAGCCTCGGAGCTGAGAATAGCGTGGCCTACT |
| | CCAATAATTCCATCGCAATCCCTACTAACTTCACTATTTCTG |
| | TGACCACCGAGATCCTGCCTGTGTCTATGACTAAGACTAGC |
| | GTTGATTGTACCATGTATATTTGTGGCGACTCTACCGAATG |
| | TTCTAACCTGCTGCTTCAGTACGGCTCATTTTGCACACAGCT |
| | GAACAGAGCCCTGACTGGGATCGCTGTGGAGCAGGACAAG |
| | AACACACAGGAGGTGTTTGCACAGGTGAAGCAGATCTATA |
| | AGACCCCTCCTATTAAGGATTTCGGCGGATTCAATTTCTCA |
| | CAGATTCTGCCAGACCCCAGTAAGCCTTCCAAGAGGAGCC |
| | CTATCGAGGATCTCCTGTTTAACAAGGTGACCCTGGCAGAC |
| | GCCGGCTTTATTAAGCAATATGGGGATTGCCTGGGCGACAT |
| | TGCTGCCAGAGACCTGATTTGCGCCCAGAAATTCAATGGCC |
| | TCACAGTGCTGCCACCTCTGCTGACCGACGAGATGATCGCT |
| | CAATACACTAGCGCACTGCTGGCCGGAACCATCACATCAG |
| | GCTGGACCTTCGGGGCCGGACCAGCACTGCAGATTCCATTC |
| | CCTATGCAGATGGCCTATAGATTCAACGGCATTGGCGTCAC |
| | ACAGAACGTGCTGTACGAAAACCAGAAGCTCATCGCTAAC |
| | CAGTTTAATTCCGCAATTGGAAAGATCCAAGATTCACTCAG |
| | CTCAACCCCCTCTGCACTCGGAAAGCTGCAGGACGTGGTCA |
| | ACCAGAATGCTCAGGCCCTGAACACACTCGTCAAGCAGCT |
| | GTCCTCTAACTTTGGCGCTATCAGCTCCGTTCTGAACGACA |
| | TTCTGAGCCGCCTGGATCCCCCAGAGGCTGAAGTCCAGATT |
| | GACCGCCTGATTACCGGCCGGCTGCAGTCTCTGCAAACATA |
| | CGTGACCCAGCAGCTGATCAGAGCAGCCGAGATCCGGGCA |
| | TCCGCAAATCTGGCAGCAACTAAGATGAGCGAATGCGTGC |
| | TGGGCCAGTCCAAGCGGGTGGACTTTTGTGGCAAGGGCTA |
| | CCACCTGATGAGCTTCCCCCAGAGCGCCCCACATGGCGTTG |
| | TTTTTCTGCACGTGACCTATGTCCCTGCTCAGGAAAAGAAC |
| | TTTACAACTGCTCCTGCTATCTGCCATGACGGCAAGGCCCA |
| | CTTCCCACGGGAGGGAGTGTTTGTGTCCAATGGCACACACT |
| | GGTTCGTGACCCAGAGGAACTTCTATGAACCCCAGATCATC |
| | ACCACTGACAATACCTTCGTGTCTGGAAATTGCGACGTCGT |
| | GATCGGCATCGTTAACAACACCGTGTACGACCCTCTCCAGC |
| | CAGAGCTGGACTCCTTTAAGGAGGAACTGGATAAGTATTTT |
| | AAGAACCACACAAGCCCAGATGTGGATCTCGGGGACATCT |
| | CCGGAATTAACGCCTCCGTGGTGAATATCCAGAAGGAGAT |
| | TGACCGCCTAAATGAAGTTGCCAAGAACCTCAATGAGTCTC |
| | TGATTGATCTGCAGGAACTGGGCAAGTATGAGCAGTATATC |
| | AAATGGCCCTGGTACATTTGGCTGGGGTTTATCGCCGGACT |
| | GATTGCCATCGTCATGGTGACCATCATGCTGTGTTGCATGA |
| | CCTCCTGTTGTTCCTGTCTGAAGGGCTGCTGTAGTTGCGGCT |
| | CTTGCTGTAAATTCGACGAAGATGATAGCGAGCCCGTGCTG |
| | AAGGGCGTGAAGCTGCATTATACCTGA |
| SARS-CoV-2 S protein | (SEQ ID NO: 135) |
| mutated to remove a | MFVFLVLLPLVSSQCVNLTTRTQLPPAYTNSFTRGVYYPDKVF |
| furin cleavage site, to | RSSVLHSTQDLFLPFFSNVTWFHAIHVSGTNGTKRFDNPVLPF |
| replace residues 817, | NDGVYFASTEKSNIIRGWIFGTTLDSKTQSLLIVNNATNVVIKV |
| 892, 899, 942, 986 and | CEFQFCNDPFLGVYYHKNNKSWMESEFRVYSSANNCTFEYVS |
| 987 with proline and | QPFLMDLEGKQGNFKNLREFVFKNIDGYFKIYSKHTPINLVRD |
| which contains the | LPQGFSALEPLVDLPIGINITRFQTLLALHRSYLTPGDSSSGWT |
| D614G mutation | AGAAAYYVGYLQPRTFLLKYNENGTITDAVDCALDPLSETKC |
| | TLKSFTVEKGIYQTSNFRVQPTESIVRFPNITNLCPFGEVFNATR |
| | FASVYAWNRKRISNCVADYSVLYNSASFSTFKCYGVSPTKLN |
| | DLCFTNVYADSFVIRGDEVRQIAPGQTGKIADYNYKLPDDFTG |
| | CVIAWNSNNLDSKVGGNYNYLYRLFRKSNLKPFERDISTEIYQ |
| | AGSTPCNGVEGFNCYFPLQSYGFQPTNGVGYQPYRVVVLSFE |
| | LLHAPATVCGPKKSTNLVKNKCVNFNFNGLTGTGVLTESNKK |
| | FLPFQQFGRDIADTTDAVRDPQTLEILDITPCSFGGVSVITPGTN |
| | TSNQVAVLYQGVNCTEVPVAIHADQLTPTWRVYSTGSNVFQ |
| | TRAGCLIGAEHVNNSYECDIPIGAGICASYQTQTNSPGSASSVA |
| | SQSIIAYTMSLGAENSVAYSNNSIAIPTNFTISVTTEILPVSMTK |
| | TSVDCTMYICGDSTECSNLLLQYGSFCTQLNRALTGIAVEQDK |
| | NTQEVFAQVKQIYKTPPIKDFGGFNFSQILPDPSKPSKRSPIEDL |
| | LFNKVTLADAGFIKQYGDCLGDIAARDLICAQKFNGLTVLPPL |
| | LTDEMIAQYTSALLAGTITSGWTFGAGPALQIPFPMQMAYRF |
| | NGIGVTQNVLYENQKLIANQFNSAIGKIQDSLSSTPSALGKLQ |
| | DVVNQNAQALNTLVKQLSSNFGAISSVLNDILSRLDPPEAEVQ |
| | IDRLITGRLQSLQTYVTQQLIRAAEIRASANLAATKMSECVLG |
| | QSKRVDFCGKGYHLMSFPQSAPHGVVFLHVTYVPAQEKNFTT |
| | APAICHDGKAHFPREGVFVSNGTHWFVTQRNFYEPQIITTDNT |
| | FVSGNCDVVIGIVNNTVYDPLQPELDSFKEELDKYFKNHTSPD |
| | VDLGDISGINASVVNIQKEIDRLNEVAKNLNESLIDLQELGKYE |
| | QYIKWPWYIWLGFIAGLIAIVMVTIMLCCMTSCCSCLKGCCSC |
| | GSCCKFDEDDSEPVLKGVKLHYT |
| Optimized nucleotide | (SEQ ID NO: 136) |
| sequence encoding a | ATGTTCCTGCTGACAACAAAAAGAACCATGTTTGTGTTCCT |
| SARS-CoV-2 S protein | GGTGCTGCTGCCTCTGGTGTCCTCACAGTGTGTCAACCTGA |
| mutated to remove a | CAACAAGAACTCAGCTGCCACCAGCCTACACCAACTCCTTC |
| furin cleavage site, to | ACCAGAGGCGTGTATTACCCAGACAAGGTGTTTAGAAGCA |
| replace residues 817, | GCGTGCTGCACTCTACCCAGGACCTCTTTCTGCCCTTTTTCA |
| 892, 899, 942, 986 and | GCAACGTGACATGGTTTCACGCAATTCACGTGTCCGGCACT |
| 987 with proline and | AATGGCACAAAGCGGTTCGACAATCCAGTCCTGCCTTTCAA |
| containing an extended | CGATGGCGTCTACTTTGCATCTACTGAGAAATCCAATATCA |
| signal sequence | TTAGGGGATGGATCTTCGGCACAACCCTGGATTCTAAGACC |
| | CAGAGCCTGCTGATCGTCAACAACGCCACAAACGTGGTCA |
| | TTAAGGTTTGCGAGTTTCAGTTCTGTAACGATCCTTTTCTGG |
| | GCGTGTATTATCATAAGAACAATAAGAGCTGGATGGAGTC |
| | CGAGTTTAGAGTGTATAGCTCTGCAAATAATTGTACCTTTG |
| | AGTACGTGAGCCAGCCCTTTCTGATGGACCTGGAGGGAAA |
| | ACAAGGAAACTTCAAAAACCTGCGGGAATTCGTTTTCAAA |
| | AACATCGACGGCTATTTCAAGATCTATAGCAAGCATACCCC |
| | AATCAACCTCGTGAGGGACCTCCCCCAGGGCTTTAGCGCAC |
| | TGGAGCCACTGGTTGACCTGCCTATCGGCATTAATATCACA |
| | AGATTTCAGACCCTGCTGGCACTGCATAGAAGCTATCTGAC |
| | CCCTGGAGACTCCTCTAGTGGGTGGACTGCCGGCGCCGCTG |
| | CCTACTATGTGGGCTATCTGCAGCCACGGACATTCCTGCTG |
| | AAATACAATGAGAACGGGACAATCACAGATGCTGTTGATT |
| | GCGCACTCGACCCCCTGTCCGAGACAAAGTGCACTCTCAAG |
| | AGCTTTACCGTCGAGAAGGGCATCTATCAGACCTCAAACTT |
| | CAGGGTGCAGCCCACAGAATCTATCGTGCGCTTCCCTAATA |
| | TCACTAACCTGTGTCCTTTCGGTGAAGTGTTCAACGCCACC |
| | AGGTTTGCTAGCGTGTATGCCTGGAACAGGAAGAGGATCT |
| | CTAACTGCGTCGCCGACTATTCCGTGCTGTATAACAGCGCC |
| | TCCTTCTCCACATTCAAATGCTATGGAGTGAGCCCGACAAA |
| | ACTGAACGATCTCTGCTTTACAAATGTCTACGCCGACTCTT |
| | TTGTGATCAGAGGGGACGAGGTCCGGCAGATCGCACCAGG |
| | ACAGACAGGCAAGATTGCTGACTACAACTATAAGCTGCCT |
| | GACGACTTCACAGGATGTGTGATCGCATGGAACTCAAACA |
| | ATCTGGACTCCAAAGTCGGGGGCAACTATAATTACCTGTAT |
| | CGCCTGTTCCGGAAGTCCAACCTGAAGCCCTTCGAGAGGG |
| | ACATCAGTACAGAGATCTATCAGGCTGGCTCCACCCCTTGC |
| | AATGGCGTCGAAGGCTTTAATTGTTATTTTCCCCTGCAGTCT |
| | TACGGGTTTCAGCCTACTAATGGAGTTGGGTACCAGCCATA |
| | CAGAGTGGTCGTGCTCAGCTTCGAGCTCCTGCATGCTCCAG |
| | CTACAGTTTGCGGGCCAAAGAAGTCCACTAACCTGGTGAA |
| | GAATAAGTGCGTCAACTTCAACTTTAACGGGCTCACCGGCA |
| | CCGGCGTGCTGACTGAGAGCAACAAGAAGTTTCTGCCATTT |
| | CAACAGTTTGGACGGGACATTGCCGACACCACCGATGCCG |
| | TTCGGGATCCACAGACCCTGGAAATTCTGGACATTACACCG |
| | TGCAGCTTCGGGGGCGTGAGCGTGATCACACCCGGAACCA |
| | ATACAAGCAACCAGGTTGCCGTCCTGTATCAGGATGTCAAT |
| | TGCACAGAAGTGCCAGTTGCTATCCACGCAGACCAGCTGA |
| | CTCCCACATGGCGGGTGTATAGCACCGGATCCAACGTGTTT |
| | CAGACCCGCGCCGGATGTCTCATTGGGGCCGAGCACGTGA |
| | ATAACAGCTACGAGTGCGACATCCCCATTGGCGCCGGCATT |
| | TGTGCGTCTTACCAGACTCAGACCAACTCTCCTGGCTCCGC |
| | CTCTTCCGTTGCTAGTCAGTCTATTATTGCCTATACCATGAG |
| | CCTCGGAGCTGAGAATAGCGTGGCCTACTCCAATAATTCCA |
| | TCGCAATCCCTACTAACTTCACTATTTCTGTGACCACCGAG |
| | ATCCTGCCTGTGTCTATGACTAAGACTAGCGTTGATTGTAC |
| | CATGTATATTTGTGGCGACTCTACCGAATGTTCTAACCTGC |
| | TGCTTCAGTACGGCTCATTTTGCACACAGCTGAACAGAGCC |
| | CTGACTGGGATCGCTGTGGAGCAGGACAAGAACACACAGG |
| | AGGTGTTTGCACAGGTGAAGCAGATCTATAAGACCCCTCCT |
| | ATTAAGGATTTCGGCGGATTCAATTTCTCACAGATTCTGCC |
| | AGACCCCAGTAAGCCTTCCAAGAGGAGCCCTATCGAGGAT |
| | CTCCTGTTTAACAAGGTGACCCTGGCAGACGCCGGCTTTAT |
| | TAAGCAATATGGGGATTGCCTGGGCGACATTGCTGCCAGA |
| | GACCTGATTTGCGCCCAGAAATTCAATGGCCTCACAGTGCT |
| | GCCACCTCTGCTGACCGACGAGATGATCGCTCAATACACTA |
| | GCGCACTGCTGGCCGGAACCATCACATCAGGCTGGACCTTC |
| | GGGGCCGGACCAGCACTGCAGATTCCATTCCCTATGCAGAT |
| | GGCCTATAGATTCAACGGCATTGGCGTCACACAGAACGTG |
| | CTGTACGAAAACCAGAAGCTCATCGCTAACCAGTTTAATTC |
| | CGCAATTGGAAAGATCCAAGATTCACTCAGCTCAACCCCCT |
| | CTGCACTCGGAAAGCTGCAGGACGTGGTCAACCAGAATGC |
| | TCAGGCCCTGAACACACTCGTCAAGCAGCTGTCCTCTAACT |
| | TTGGCGCTATCAGCTCCGTTCTGAACGACATTCTGAGCCGC |
| | CTGGATCCCCCAGAGGCTGAAGTCCAGATTGACCGCCTGAT |
| | TACCGGCCGGCTGCAGTCTCTGCAAACATACGTGACCCAGC |
| | AGCTGATCAGAGCAGCCGAGATCCGGGCATCCGCAAATCT |
| | GGCAGCAACTAAGATGAGCGAATGCGTGCTGGGCCAGTCC |
| | AAGCGGGTGGACTTTTGTGGCAAGGGCTACCACCTGATGA |
| | GCTTCCCCCAGAGCGCCCCACATGGCGTTGTTTTTCTGCAC |
| | GTGACCTATGTCCCTGCTCAGGAAAAGAACTTTACAACTGC |
| | TCCTGCTATCTGCCATGACGGCAAGGCCCACTTCCCACGGG |
| | AGGGAGTGTTTGTGTCCAATGGCACACACTGGTTCGTGACC |
| | CAGAGGAACTTCTATGAACCCCAGATCATCACCACTGACA |
| | ATACCTTCGTGTCTGGAAATTGCGACGTCGTGATCGGCATC |
| | GTTAACAACACCGTGTACGACCCTCTCCAGCCAGAGCTGGA |
| | CTCCTTTAAGGAGGAACTGGATAAGTATTTTAAGAACCACA |
| | CAAGCCCAGATGTGGATCTCGGGGACATCTCCGGAATTAA |
| | CGCCTCCGTGGTGAATATCCAGAAGGAGATTGACCGCCTA |
| | AATGAAGTTGCCAAGAACCTCAATGAGTCTCTGATTGATCT |
| | GCAGGAACTGGGCAAGTATGAGCAGTATATCAAATGGCCC |
| | TGGTACATTTGGCTGGGGTTTATCGCCGGACTGATTGCCAT |
| | CGTCATGGTGACCATCATGCTGTGTTGCATGACCTCCTGTT |
| | GTTCCTGTCTGAAGGGCTGCTGTAGTTGCGGCTCTTGCTGT |
| | AAATTCGACGAAGATGATAGCGAGCCCGTGCTGAAGGGCG |
| | TGAAGCTGCATTATACCTGA |
| SARS-CoV-2 S protein | (SEQ ID NO: 137) |
| mutated to remove a | MFLLTTKRTMFVFLVLLPLVSSQCVNLTTRTQLPPAYTNSFTR |
| furin cleavage site, to | GVYYPDKVFRSSVLHSTQDLFLPFFSNVTWFHAIHVSGTNGTK |
| replace residues 817, | RFDNPVLPFNDGVYFASTEKSNIIRGWIFGTTLDSKTQSLLIVN |
| 892, 899, 942, 986 and | NATNVVIKVCEFQFCNDPFLGVYYHKNNKSWMESEFRVYSS |
| 987 with proline and | ANNCTFEYVSQPFLMDLEGKQGNFKNLREFVFKNIDGYFKIYS |
| containing an extended | KHTPINLVRDLPQGFSALEPLVDLPIGINITRFQTLLALHRSYLT |
| signal sequence | PGDSSSGWTAGAAAYYVGYLQPRTFLLKYNENGTITDAVDC |
| | ALDPLSETKCTLKSFTVEKGIYQTSNFRVQPTESIVRFPNITNLC |
| | PFGEVFNATRFASVYAWNRKRISNCVADYSVLYNSASFSTFK |
| | CYGVSPTKLNDLCFTNVYADSFVIRGDEVRQIAPGQTGKIADY |
| | NYKLPDDFTGCVIAWNSNNLDSKVGGNYNYLYRLFRKSNLK |
| | PFERDISTEIYQAGSTPCNGVEGFNCYFPLQSYGFQPTNGVGY |
| | QPYRVVVLSFELLHAPATVCGPKKSTNLVKNKCVNFNFNGLT |
| | GTGVLTESNKKFLPFQQFGRDIADTTDAVRDPQTLEILDITPCS |
| | FGGVSVITPGTNTSNQVAVLYQDVNCTEVPVAIHADQLTPTW |
| | RVYSTGSNVFQTRAGCLIGAEHVNNSYECDIPIGAGICASYQT |
| | QTNSPGSASSVASQSIIAYTMSLGAENSVAYSNNSIAIPTNFTIS |
| | VTTEILPVSMTKTSVDCTMYICGDSTECSNLLLQYGSFCTQLN |
| | RALTGIAVEQDKNTQEVFAQVKQIYKTPPIKDFGGFNFSQILPD |
| | PSKPSKRSPIEDLLFNKVTLADAGFIKQYGDCLGDIAARDLICA |
| | QKFNGLTVLPPLLTDEMIAQYTSALLAGTITSGWTFGAGPALQ |
| | IPFPMQMAYRFNGIGVTQNVLYENQKLIANQFNSAIGKIQDSL |
| | SSTPSALGKLQDVVNQNAQALNTLVKQLSSNFGAISSVLNDIL |
| | SRLDPPEAEVQIDRLITGRLQSLQTYVTQQLIRAAEIRASANLA |
| | ATKMSECVLGQSKRVDFCGKGYHLMSFPQSAPHGVVFLHVT |
| | YVPAQEKNFTTAPAICHDGKAHFPREGVFVSNGTHWFVTQRN |
| | FYEPQIITTDNTFVSGNCDVVIGIVNNTVYDPLQPELDSFKEEL |
| | DKYFKNHTSPDVDLGDISGINASVVNIQKEIDRLNEVAKNLNE |
| | SLIDLQELGKYEQYIKWPWYIWLGFIAGLIAIVMVTIMLCCMT |
| | SCCSCLKGCCSCGSCCKFDEDDSEPVLKGVKLHYT |
| Optimized nucleotide | (SEQ ID NO: 138) |
| sequence encoding a | ATGTTCGTCTTCCTCGTGCTGCTCCCACTCGTTTCTTCCCAG |
| SARS-CoV-2 S protein | TGTGTCAACCTGACAACTAGGACTCAGCTGCCACCAGCCTA |
| mutated to remove a | CACCAACTCCTTCACCAGAGGCGTGTATTACCCAGACAAGG |
| furin cleavage site, to | TGTTTAGAAGCAGCGTGCTGCACTCTACCCAGGACCTCTTT |
| replace residues 817, | CTGCCCTTTTTCAGCAACGTGACATGGTTTCACGCAATTCA |
| 892, 899, 942, 986 and | CGTGTCCGGCACTAATGGCACAAAGCGGTTCGACAATCCA |
| 987 with proline and to | GTCCTGCCTTTCAACGATGGCGTCTACTTTGCATCTACTGA |
| mutate the ER retrieval | GAAATCCAATATCATTAGGGGATGGATCTTCGGCACAACCC |
| signal | TGGATTCTAAGACCCAGAGCCTGCTGATCGTCAACAACGCC |
| | ACAAACGTGGTCATTAAGGTTTGCGAGTTTCAGTTCTGTAA |
| | CGATCCTTTTCTGGGCGTGTATTATCATAAGAACAATAAGA |
| | GCTGGATGGAGTCCGAGTTTAGAGTGTATAGCTCTGCAAAT |
| | AATTGTACCTTTGAGTACGTGAGCCAGCCCTTTCTGATGGA |
| | CCTGGAGGGAAAACAAGGAAACTTCAAAAACCTGCGGGAA |
| | TTCGTTTTCAAAAACATCGACGGCTATTTCAAGATCTATAG |
| | CAAGCATACCCCAATCAACCTCGTGAGGGACCTCCCCCAG |
| | GGCTTTAGCGCACTGGAGCCACTGGTTGACCTGCCTATCGG |
| | CATTAATATCACAAGATTTCAGACCCTGCTGGCACTGCATA |
| | GAAGCTATCTGACCCCTGGAGACTCCTCTAGTGGGTGGACT |
| | GCCGGCGCCGCTGCCTACTATGTGGGCTATCTGCAGCCACG |
| | GACATTCCTGCTGAAATACAATGAGAACGGGACAATCACA |
| | GATGCTGTTGATTGCGCACTCGACCCCCTGTCCGAGACAAA |
| | GTGCACTCTCAAGAGCTTTACCGTCGAGAAGGGCATCTATC |
| | AGACCTCAAACTTCAGGGTGCAGCCCACAGAATCTATCGTG |
| | CGCTTCCCTAATATCACTAACCTGTGTCCTTTCGGTGAAGT |
| | GTTCAACGCCACCAGGTTTGCTAGCGTGTATGCCTGGAACA |
| | GGAAGAGGATCTCTAACTGCGTCGCCGACTATTCCGTGCTG |
| | TATAACAGCGCCTCCTTCTCCACATTCAAATGCTATGGAGT |
| | GAGCCCGACAAAACTGAACGATCTCTGCTTTACAAATGTCT |
| | ACGCCGACTCTTTTGTGATCAGAGGGGACGAGGTCCGGCA |
| | GATCGCACCAGGACAGACAGGCAAGATTGCTGACTACAAC |
| | TATAAGCTGCCTGACGACTTCACAGGATGTGTGATCGCATG |
| | GAACTCAAACAATCTGGACTCCAAAGTCGGGGGCAACTAT |
| | AATTACCTGTATCGCCTGTTCCGGAAGTCCAACCTGAAGCC |
| | CTTCGAGAGGGACATCAGTACAGAGATCTATCAGGCTGGC |
| | TCCACCCCTTGCAATGGCGTCGAAGGCTTTAATTGTTATTTT |
| | CCCCTGCAGTCTTACGGGTTTCAGCCTACTAATGGAGTTGG |
| | GTACCAGCCATACAGAGTGGTCGTGCTCAGCTTCGAGCTCC |
| | TGCATGCTCCAGCTACAGTTTGCGGGCCAAAGAAGTCCACT |
| | AACCTGGTGAAGAATAAGTGCGTCAACTTCAACTTTAACGG |
| | GCTCACCGGCACCGGCGTGCTGACTGAGAGCAACAAGAAG |
| | TTTCTGCCATTTCAACAGTTTGGACGGGACATTGCCGACAC |
| | CACCGATGCCGTTCGGGATCCACAGACCCTGGAAATTCTGG |
| | ACATTACACCGTGCAGCTTCGGGGGCGTGAGCGTGATCAC |
| | ACCCGGAACCAATACAAGCAACCAGGTTGCCGTCCTGTATC |
| | AGGATGTCAATTGCACAGAAGTGCCAGTTGCTATCCACGCA |
| | GACCAGCTGACTCCCACATGGCGGGTGTATAGCACCGGAT |
| | CCAACGTGTTTCAGACCCGCGCCGGATGTCTCATTGGGGCC |
| | GAGCACGTGAATAACAGCTACGAGTGCGACATCCCCATTG |
| | GCGCCGGCATTTGTGCGTCTTACCAGACTCAGACCAACTCT |
| | CCTGGCTCCGCCTCTTCCGTTGCTAGTCAGTCTATTATTGCC |
| | TATACCATGAGCCTCGGAGCTGAGAATAGCGTGGCCTACTC |
| | CAATAATTCCATCGCAATCCCTACTAACTTCACTATTTCTGT |
| | GACCACCGAGATCCTGCCTGTGTCTATGACTAAGACTAGCG |
| | TTGATTGTACCATGTATATTTGTGGCGACTCTACCGAATGTT |
| | CTAACCTGCTGCTTCAGTACGGCTCATTTTGCACACAGCTG |
| | AACAGAGCCCTGACTGGGATCGCTGTGGAGCAGGACAAGA |
| | ACACACAGGAGGTGTTTGCACAGGTGAAGCAGATCTATAA |
| | GACCCCTCCTATTAAGGATTTCGGCGGATTCAATTTCTCAC |
| | AGATTCTGCCAGACCCCAGTAAGCCTTCCAAGAGGAGCCCT |
| | ATCGAGGATCTCCTGTTTAACAAGGTGACCCTGGCAGACGC |
| | CGGCTTTATTAAGCAATATGGGGATTGCCTGGGCGACATTG |
| | CTGCCAGAGACCTGATTTGCGCCCAGAAATTCAATGGCCTC |
| | ACAGTGCTGCCACCTCTGCTGACCGACGAGATGATCGCTCA |
| | ATACACTAGCGCACTGCTGGCCGGAACCATCACATCAGGCT |
| | GGACCTTCGGGGCCGGACCAGCACTGCAGATTCCATTCCCT |
| | ATGCAGATGGCCTATAGATTCAACGGCATTGGCGTCACACA |
| | GAACGTGCTGTACGAAAACCAGAAGCTCATCGCTAACCAG |
| | TTTAATTCCGCAATTGGAAAGATCCAAGATTCACTCAGCTC |
| | AACCCCCTCTGCACTCGGAAAGCTGCAGGACGTGGTCAAC |
| | CAGAATGCTCAGGCCCTGAACACACTCGTCAAGCAGCTGTC |
| | CTCTAACTTTGGCGCTATCAGCTCCGTTCTGAACGACATTCT |
| | GAGCCGCCTGGATCCCCCAGAGGCTGAAGTCCAGATTGAC |
| | CGCCTGATTACCGGCCGGCTGCAGTCTCTGCAAACATACGT |
| | GACCCAGCAGCTGATCAGAGCAGCCGAGATCCGGGCATCC |
| | GCAAATCTGGCAGCAACTAAGATGAGCGAATGCGTGCTGG |
| | GCCAGTCCAAGCGGGTGGACTTTTGTGGCAAGGGCTACCA |
| | CCTGATGAGCTTCCCCCAGAGCGCCCCACATGGCGTTGTTT |
| | TTCTGCACGTGACCTATGTCCCTGCTCAGGAAAAGAACTTT |
| | ACAACTGCTCCTGCTATCTGCCATGACGGCAAGGCCCACTT |
| | CCCACGGGAGGGAGTGTTTGTGTCCAATGGCACACACTGGT |
| | TCGTGACCCAGAGGAACTTCTATGAACCCCAGATCATCACC |
| | ACTGACAATACCTTCGTGTCTGGAAATTGCGACGTCGTGAT |
| | CGGCATCGTTAACAACACCGTGTACGACCCTCTCCAGCCAG |
| | AGCTGGACTCCTTTAAGGAGGAACTGGATAAGTATTTTAAG |
| | AACCACACAAGCCCAGATGTGGATCTCGGGGACATCTCCG |
| | GAATTAACGCCTCCGTGGTGAATATCCAGAAGGAGATTGA |
| | CCGCCTAAATGAAGTTGCCAAGAACCTCAATGAGTCTCTGA |
| | TTGATCTGCAGGAACTGGGCAAGTATGAGCAGTATATCAA |
| | ATGGCCCTGGTACATTTGGCTGGGGTTTATCGCCGGACTGA |
| | TTGCCATCGTCATGGTGACCATCATGCTGTGTTGCATGACC |
| | TCCTGTTGTTCCTGTCTGAAGGGCTGCTGTAGTTGCGGCTCT |
| | TGCTGTAAATTCGACGAAGATGATAGCGAGCCCGTGCTGA |
| | AGGGCGTGGCCCTGGCTTATACCTGA |
| SARS-CoV-2 S protein | (SEQ ID NO: 139) |
| mutated to remove a | MFVFLVLLPLVSSQCVNLTTRTQLPPAYTNSFTRGVYYPDKVF |
| furin cleavage site, to | RSSVLHSTQDLFLPFFSNVTWFHAIHVSGTNGTKRFDNPVLPF |
| replace residues 817, | NDGVYFASTEKSNIIRGWIFGTTLDSKTQSLLIVNNATNVVIKV |
| 892, 899, 942, 986 and | CEFQFCNDPFLGVYYHKNNKSWMESEFRVYSSANNCTFEYVS |
| 987 with proline and to | QPFLMDLEGKQGNFKNLREFVFKNIDGYFKIYSKHTPINLVRD |
| mutate the ER retrieval | LPQGFSALEPLVDLPIGINITRFQTLLALHRSYLTPGDSSSGWT |
| signal | AGAAAYYVGYLQPRTFLLKYNENGTITDAVDCALDPLSETKC |
| | TLKSFTVEKGIYQTSNFRVQPTESIVRFPNITNLCPFGEVFNATR |
| | FASVYAWNRKRISNCVADYSVLYNSASFSTFKCYGVSPTKLN |
| | DLCFTNVYADSFVIRGDEVRQIAPGQTGKIADYNYKLPDDFTG |
| | CVIAWNSNNLDSKVGGNYNYLYRLFRKSNLKPFERDISTEIYQ |
| | AGSTPCNGVEGFNCYFPLQSYGFQPTNGVGYQPYRVVVLSFE |
| | LLHAPATVCGPKKSTNLVKNKCVNFNFNGLTGTGVLTESNKK |
| | FLPFQQFGRDIADTTDAVRDPQTLEILDITPCSFGGVSVITPGTN |
| | TSNQVAVLYQDVNCTEVPVAIHADQLTPTWRVYSTGSNVFQT |
| | RAGCLIGAEHVNNSYECDIPIGAGICASYQTQTNSPGSASSVAS |
| | QSIIAYTMSLGAENSVAYSNNSIAIPTNFTISVTTEILPVSMTKT |
| | SVDCTMYICGDSTECSNLLLQYGSFCTQLNRALTGIAVEQDK |
| | NTQEVFAQVKQIYKTPPIKDFGGFNFSQILPDPSKPSKRSPIEDL |
| | LFNKVTLADAGFIKQYGDCLGDIAARDLICAQKFNGLTVLPPL |
| | LTDEMIAQYTSALLAGTITSGWTFGAGPALQIPFPMQMAYRF |
| | NGIGVTQNVLYENQKLIANQFNSAIGKIQDSLSSTPSALGKLQ |
| | DVVNQNAQALNTLVKQLSSNFGAISSVLNDILSRLDPPEAEVQ |
| | IDRLITGRLQSLQTYVTQQLIRAAEIRASANLAATKMSECVLG |
| | QSKRVDFCGKGYHLMSFPQSAPHGVVFLHVTYVPAQEKNFTT |
| | APAICHDGKAHFPREGVFVSNGTHWFVTQRNFYEPQIITTDNT |
| | FVSGNCDVVIGIVNNTVYDPLQPELDSFKEELDKYFKNHTSPD |
| | VDLGDISGINASVVNIQKEIDRLNEVAKNLNESLIDLQELGKYE |
| | QYIKWPWYIWLGFIAGLIAIVMVTIMLCCMTSCCSCLKGCCSC |
| | GSCCKFDEDDSEPVLKGVALAYT |
| Optimized nucleotide | (SEQ ID NO: 140) |
| sequence encoding a | ATGTTCCTGCTGACAACAAAAAGAACCATGTTTGTGTTCCT |
| SARS-CoV-2 S protein | GGTGCTGCTGCCTCTGGTGTCCTCACAGTGTGTCAACCTGA |
| mutated to remove a | CAACAAGAACTCAGCTGCCACCAGCCTACACCAACTCCTTC |
| furin cleavage site, to | ACCAGAGGCGTGTATTACCCAGACAAGGTGTTTAGAAGCA |
| replace residues 817, | GCGTGCTGCACTCTACCCAGGACCTCTTTCTGCCCTTTTTCA |
| 892, 899, 942, 986 and | GCAACGTGACATGGTTTCACGCAATTCACGTGTCCGGCACT |
| 987 with proline, to | AATGGCACAAAGCGGTTCGACAATCCAGTCCTGCCTTTCAA |
| mutate the ER retrieval | CGATGGCGTCTACTTTGCATCTACTGAGAAATCCAATATCA |
| signal and containing an | TTAGGGGATGGATCTTCGGCACAACCCTGGATTCTAAGACC |
| extended signal | CAGAGCCTGCTGATCGTCAACAACGCCACAAACGTGGTCA |
| sequence | TTAAGGTTTGCGAGTTTCAGTTCTGTAACGATCCTTTTCTGG |
| | GCGTGTATTATCATAAGAACAATAAGAGCTGGATGGAGTC |
| | CGAGTTTAGAGTGTATAGCTCTGCAAATAATTGTACCTTTG |
| | AGTACGTGAGCCAGCCCTTTCTGATGGACCTGGAGGGAAA |
| | ACAAGGAAACTTCAAAAACCTGCGGGAATTCGTTTTCAAA |
| | AACATCGACGGCTATTTCAAGATCTATAGCAAGCATACCCC |
| | AATCAACCTCGTGAGGGACCTCCCCCAGGGCTTTAGCGCAC |
| | TGGAGCCACTGGTTGACCTGCCTATCGGCATTAATATCACA |
| | AGATTTCAGACCCTGCTGGCACTGCATAGAAGCTATCTGAC |
| | CCCTGGAGACTCCTCTAGTGGGTGGACTGCCGGCGCCGCTG |
| | CCTACTATGTGGGCTATCTGCAGCCACGGACATTCCTGCTG |
| | AAATACAATGAGAACGGGACAATCACAGATGCTGTTGATT |
| | GCGCACTCGACCCCCTGTCCGAGACAAAGTGCACTCTCAAG |
| | AGCTTTACCGTCGAGAAGGGCATCTATCAGACCTCAAACTT |
| | CAGGGTGCAGCCCACAGAATCTATCGTGCGCTTCCCTAATA |
| | TCACTAACCTGTGTCCTTTCGGTGAAGTGTTCAACGCCACC |
| | AGGTTTGCTAGCGTGTATGCCTGGAACAGGAAGAGGATCT |
| | CTAACTGCGTCGCCGACTATTCCGTGCTGTATAACAGCGCC |
| | TCCTTCTCCACATTCAAATGCTATGGAGTGAGCCCGACAAA |
| | ACTGAACGATCTCTGCTTTACAAATGTCTACGCCGACTCTT |
| | TTGTGATCAGAGGGGACGAGGTCCGGCAGATCGCACCAGG |
| | ACAGACAGGCAAGATTGCTGACTACAACTATAAGCTGCCT |
| | GACGACTTCACAGGATGTGTGATCGCATGGAACTCAAACA |
| | ATCTGGACTCCAAAGTCGGGGGCAACTATAATTACCTGTAT |
| | CGCCTGTTCCGGAAGTCCAACCTGAAGCCCTTCGAGAGGG |
| | ACATCAGTACAGAGATCTATCAGGCTGGCTCCACCCCTTGC |
| | AATGGCGTCGAAGGCTTTAATTGTTATTTTCCCCTGCAGTCT |
| | TACGGGTTTCAGCCTACTAATGGAGTTGGGTACCAGCCATA |
| | CAGAGTGGTCGTGCTCAGCTTCGAGCTCCTGCATGCTCCAG |
| | CTACAGTTTGCGGGCCAAAGAAGTCCACTAACCTGGTGAA |
| | GAATAAGTGCGTCAACTTCAACTTTAACGGGCTCACCGGCA |
| | CCGGCGTGCTGACTGAGAGCAACAAGAAGTTTCTGCCATTT |
| | CAACAGTTTGGACGGGACATTGCCGACACCACCGATGCCG |
| | TTCGGGATCCACAGACCCTGGAAATTCTGGACATTACACCG |
| | TGCAGCTTCGGGGGCGTGAGCGTGATCACACCCGGAACCA |
| | ATACAAGCAACCAGGTTGCCGTCCTGTATCAGGATGTCAAT |
| | TGCACAGAAGTGCCAGTTGCTATCCACGCAGACCAGCTGA |
| | CTCCCACATGGCGGGTGTATAGCACCGGATCCAACGTGTTT |
| | CAGACCCGCGCCGGATGTCTCATTGGGGCCGAGCACGTGA |
| | ATAACAGCTACGAGTGCGACATCCCCATTGGCGCCGGCATT |
| | TGTGCGTCTTACCAGACTCAGACCAACTCTCCTGGCTCCGC |
| | CTCTTCCGTTGCTAGTCAGTCTATTATTGCCTATACCATGAG |
| | CCTCGGAGCTGAGAATAGCGTGGCCTACTCCAATAATTCCA |
| | TCGCAATCCCTACTAACTTCACTATTTCTGTGACCACCGAG |
| | ATCCTGCCTGTGTCTATGACTAAGACTAGCGTTGATTGTAC |
| | CATGTATATTTGTGGCGACTCTACCGAATGTTCTAACCTGC |
| | TGCTTCAGTACGGCTCATTTTGCACACAGCTGAACAGAGCC |
| | CTGACTGGGATCGCTGTGGAGCAGGACAAGAACACACAGG |
| | AGGTGTTTGCACAGGTGAAGCAGATCTATAAGACCCCTCCT |
| | ATTAAGGATTTCGGCGGATTCAATTTCTCACAGATTCTGCC |
| | AGACCCCAGTAAGCCTTCCAAGAGGAGCCCTATCGAGGAT |
| | CTCCTGTTTAACAAGGTGACCCTGGCAGACGCCGGCTTTAT |
| | TAAGCAATATGGGGATTGCCTGGGCGACATTGCTGCCAGA |
| | GACCTGATTTGCGCCCAGAAATTCAATGGCCTCACAGTGCT |
| | GCCACCTCTGCTGACCGACGAGATGATCGCTCAATACACTA |
| | GCGCACTGCTGGCCGGAACCATCACATCAGGCTGGACCTTC |
| | GGGGCCGGACCAGCACTGCAGATTCCATTCCCTATGCAGAT |
| | GGCCTATAGATTCAACGGCATTGGCGTCACACAGAACGTG |
| | CTGTACGAAAACCAGAAGCTCATCGCTAACCAGTTTAATTC |
| | CGCAATTGGAAAGATCCAAGATTCACTCAGCTCAACCCCCT |
| | CTGCACTCGGAAAGCTGCAGGACGTGGTCAACCAGAATGC |
| | TCAGGCCCTGAACACACTCGTCAAGCAGCTGTCCTCTAACT |
| | TTGGCGCTATCAGCTCCGTTCTGAACGACATTCTGAGCCGC |
| | CTGGATCCCCCAGAGGCTGAAGTCCAGATTGACCGCCTGAT |
| | TACCGGCCGGCTGCAGTCTCTGCAAACATACGTGACCCAGC |
| | AGCTGATCAGAGCAGCCGAGATCCGGGCATCCGCAAATCT |
| | GGCAGCAACTAAGATGAGCGAATGCGTGCTGGGCCAGTCC |
| | AAGCGGGTGGACTTTTGTGGCAAGGGCTACCACCTGATGA |
| | GCTTCCCCCAGAGCGCCCCACATGGCGTTGTTTTTCTGCAC |
| | GTGACCTATGTCCCTGCTCAGGAAAAGAACTTTACAACTGC |
| | TCCTGCTATCTGCCATGACGGCAAGGCCCACTTCCCACGGG |
| | AGGGAGTGTTTGTGTCCAATGGCACACACTGGTTCGTGACC |
| | CAGAGGAACTTCTATGAACCCCAGATCATCACCACTGACA |
| | ATACCTTCGTGTCTGGAAATTGCGACGTCGTGATCGGCATC |
| | GTTAACAACACCGTGTACGACCCTCTCCAGCCAGAGCTGGA |
| | CTCCTTTAAGGAGGAACTGGATAAGTATTTTAAGAACCACA |
| | CAAGCCCAGATGTGGATCTCGGGGACATCTCCGGAATTAA |
| | CGCCTCCGTGGTGAATATCCAGAAGGAGATTGACCGCCTA |
| | AATGAAGTTGCCAAGAACCTCAATGAGTCTCTGATTGATCT |
| | GCAGGAACTGGGCAAGTATGAGCAGTATATCAAATGGCCC |
| | TGGTACATTTGGCTGGGGTTTATCGCCGGACTGATTGCCAT |
| | CGTCATGGTGACCATCATGCTGTGTTGCATGACCTCCTGTT |
| | GTTCCTGTCTGAAGGGCTGCTGTAGTTGCGGCTCTTGCTGT |
| | AAATTCGACGAAGATGATAGCGAGCCCGTGCTGAAGGGCG |
| | TGGCCCTGGCTTATACCTGA |
| SARS-CoV-2 S protein | (SEQ ID NO: 141) |
| mutated to remove a | MFLLTTKRTMFVFLVLLPLVSSQCVNLTTRTQLPPAYTNSFTR |
| furin cleavage site, to | GVYYPDKVFRSSVLHSTQDLFLPFFSNVTWFHAIHVSGTNGTK |
| replace residues 817, | RFDNPVLPFNDGVYFASTEKSNIIRGWIFGTTLDSKTQSLLIVN |
| 892, 899, 942, 986 and | NATNVVIKVCEFQFCNDPFLGVYYHKNNKSWMESEFRVYSS |
| 987 with proline, to | ANNCTFEYVSQPFLMDLEGKQGNFKNLREFVFKNIDGYFKIYS |
| mutate the ER retrieval | KHTPINLVRDLPQGFSALEPLVDLPIGINITRFQTLLALHRSYLT |
| signal and containing an | PGDSSSGWTAGAAAYYVGYLQPRTFLLKYNENGTITDAVDC |
| extended signal | ALDPLSETKCTLKSFTVEKGIYQTSNFRVQPTESIVRFPNITNLC |
| sequence | PFGEVFNATRFASVYAWNRKRISNCVADYSVLYNSASFSTFK |
| | CYGVSPTKLNDLCFTNVYADSFVIRGDEVRQIAPGQTGKIADY |
| | NYKLPDDFTGCVIAWNSNNLDSKVGGNYNYLYRLFRKSNLK |
| | PFERDISTEIYQAGSTPCNGVEGFNCYFPLQSYGFQPTNGVGY |
| | QPYRVVVLSFELLHAPATVCGPKKSTNLVKNKCVNFNFNGLT |
| | GTGVLTESNKKFLPFQQFGRDIADTTDAVRDPQTLEILDITPCS |
| | FGGVSVITPGTNTSNQVAVLYQDVNCTEVPVAIHADQLTPTW |
| | RVYSTGSNVFQTRAGCLIGAEHVNNSYECDIPIGAGICASYQT |
| | QTNSPGSASSVASQSIIAYTMSLGAENSVAYSNNSIAIPTNFTIS |
| | VTTEILPVSMTKTSVDCTMYICGDSTECSNLLLQYGSFCTQLN |
| | RALTGIAVEQDKNTQEVFAQVKQIYKTPPIKDFGGFNFSQILPD |
| | PSKPSKRSPIEDLLFNKVTLADAGFIKQYGDCLGDIAARDLICA |
| | QKFNGLTVLPPLLTDEMIAQYTSALLAGTITSGWTFGAGPALQ |
| | IPFPMQMAYRFNGIGVTQNVLYENQKLIANQFNSAIGKIQDSL |
| | SSTPSALGKLQDVVNQNAQALNTLVKQLSSNFGAISSVLNDIL |
| | SRLDPPEAEVQIDRLITGRLQSLQTYVTQQLIRAAEIRASANLA |
| | ATKMSECVLGQSKRVDFCGKGYHLMSFPQSAPHGVVFLHVT |
| | YVPAQEKNFTTAPAICHDGKAHFPREGVFVSNGTHWFVTQRN |
| | FYEPQIITTDNTFVSGNCDVVIGIVNNTVYDPLQPELDSFKEEL |
| | DKYFKNHTSPDVDLGDISGINASVVNIQKEIDRLNEVAKNLNE |
| | SLIDLQELGKYEQYIKWPWYIWLGFIAGLIAIVMVTIMLCCMT |
| | SCCSCLKGCCSCGSCCKFDEDDSEPVLKGVALAYT |
| Optimized nucleotide | (SEQ ID NO: 150) |
| sequence encoding a | ATGTTCGTCTTCCTCGTGCTGCTCCCACTCGTTTCTTCCCAG |
| SARS-CoV-2 S protein | TGTGTCAACCTGACAACTAGGACTCAGCTGCCACCAGCCTA |
| mutated to contain the | CACCAACTCCTTCACCAGAGGCGTGTATTACCCAGACAAGG |
| H69-, V70-, Y144-, | TGTTTAGAAGCAGCGTGCTGCACTCTACCCAGGACCTCTTT |
| N501Y, A570D, D614G, | CTGCCCTTTTTCAGCAACGTGACATGGTTTCACGCAATTTCC |
| P681H, T716I, S982A | GGCACTAATGGCACAAAGCGGTTCGACAATCCAGTCCTGC |
| and D1118H mutations | CTTTCAACGATGGCGTCTACTTTGCATCTACTGAGAAATCC |
| | AATATCATTAGGGGATGGATCTTCGGCACAACCCTGGATTC |
| | TAAGACCCAGAGCCTGCTGATCGTCAACAACGCCACAAAC |
| | GTGGTCATTAAGGTTTGCGAGTTTCAGTTCTGTAACGATCC |
| | TTTTCTGGGCGTTTACCATAAGAACAATAAGAGCTGGATGG |
| | AGTCCGAGTTTAGAGTGTATAGCTCTGCAAATAATTGTACC |
| | TTTGAGTACGTGAGCCAGCCCTTTCTGATGGACCTGGAGGG |
| | AAAACAAGGAAACTTCAAAAACCTGCGGGAATTCGTTTTC |
| | AAAAACATCGACGGCTATTTCAAGATCTATAGCAAGCATA |
| | CCCCAATCAACCTCGTGAGGGACCTCCCCCAGGGCTTTAGC |
| | GCACTGGAGCCACTGGTTGACCTGCCTATCGGCATTAATAT |
| | CACAAGATTTCAGACCCTGCTGGCACTGCATAGAAGCTATC |
| | TGACCCCTGGAGACTCCTCTAGTGGGTGGACTGCCGGCGCC |
| | GCTGCCTACTATGTGGGCTATCTGCAGCCACGGACATTCCT |
| | GCTGAAATACAATGAGAACGGGACAATCACAGATGCTGTT |
| | GATTGCGCACTCGACCCCCTGTCCGAGACAAAGTGCACTCT |
| | CAAGAGCTTTACCGTCGAGAAGGGCATCTATCAGACCTCA |
| | AACTTCAGGGTGCAGCCCACAGAATCTATCGTGCGCTTCCC |
| | TAATATCACTAACCTGTGTCCTTTCGGTGAAGTGTTCAACG |
| | CCACCAGGTTTGCTAGCGTGTATGCCTGGAACAGGAAGAG |
| | GATCTCTAACTGCGTCGCCGACTATTCCGTGCTGTATAACA |
| | GCGCCTCCTTCTCCACATTCAAATGCTATGGAGTGAGCCCG |
| | ACAAAACTGAACGATCTCTGCTTTACAAATGTCTACGCCGA |
| | CTCTTTTGTGATCAGAGGGGACGAGGTCCGGCAGATCGCAC |
| | CAGGACAGACAGGCAAGATTGCTGACTACAACTATAAGCT |
| | GCCTGACGACTTCACAGGATGTGTGATCGCATGGAACTCAA |
| | ACAATCTGGACTCCAAAGTCGGGGGCAACTATAATTACCTG |
| | TATCGCCTGTTCCGGAAGTCCAACCTGAAGCCCTTCGAGAG |
| | GGACATCAGTACAGAGATCTATCAGGCTGGCTCCACCCCTT |
| | GCAATGGCGTCGAAGGCTTTAATTGTTATTTTCCCCTGCAG |
| | TCTTACGGGTTTCAGCCTACTTATGGAGTTGGGTACCAGCC |
| | ATACAGAGTGGTCGTGCTCAGCTTCGAGCTCCTGCATGCTC |
| | CAGCTACAGTTTGCGGGCCAAAGAAGTCCACTAACCTGGT |
| | GAAGAATAAGTGCGTCAACTTCAACTTTAACGGGCTCACCG |
| | GCACCGGCGTGCTGACTGAGAGCAACAAGAAGTTTCTGCC |
| | ATTTCAACAGTTTGGACGGGACATTGATGACACCACCGAT |
| | GCCGTTCGGGATCCACAGACCCTGGAAATTCTGGACATTAC |
| | ACCGTGCAGCTTCGGGGGCGTGAGCGTGATCACACCCGGA |
| | ACCAATACAAGCAACCAGGTTGCCGTCCTGTATCAGGGAG |
| | TCAATTGCACAGAAGTGCCAGTTGCTATCCACGCAGACCAG |
| | CTGACTCCCACATGGCGGGTGTATAGCACCGGATCCAACGT |
| | GTTTCAGACCCGCGCCGGATGTCTCATTGGGGCCGAGCACG |
| | TGAATAACAGCTACGAGTGCGACATCCCCATTGGCGCCGG |
| | CATTTGTGCGTCTTACCAGACTCAGACCAACTCTCATAGAA |
| | GGGCCAGGTCCGTTGCTAGTCAGTCTATTATTGCCTATACC |
| | ATGAGCCTCGGAGCTGAGAATAGCGTGGCCTACTCCAATA |
| | ATTCCATCGCAATCCCTATAAACTTCACTATTTCTGTGACC |
| | ACCGAGATCCTGCCTGTGTCTATGACTAAGACTAGCGTTGA |
| | TTGTACCATGTATATTTGTGGCGACTCTACCGAATGTTCTA |
| | ACCTGCTGCTTCAGTACGGCTCATTTTGCACACAGCTGAAC |
| | AGAGCCCTGACTGGGATCGCTGTGGAGCAGGACAAGAACA |
| | CACAGGAGGTGTTTGCACAGGTGAAGCAGATCTATAAGAC |
| | CCCTCCTATTAAGGATTTCGGCGGATTCAATTTCTCACAGA |
| | TTCTGCCAGACCCCAGTAAGCCTTCCAAGAGGAGCTTCATC |
| | GAGGATCTCCTGTTTAACAAGGTGACCCTGGCAGACGCCG |
| | GCTTTATTAAGCAATATGGGGATTGCCTGGGCGACATTGCT |
| | GCCAGAGACCTGATTTGCGCCCAGAAATTCAATGGCCTCAC |
| | AGTGCTGCCACCTCTGCTGACCGACGAGATGATCGCTCAAT |
| | ACACTAGCGCACTGCTGGCCGGAACCATCACATCAGGCTG |
| | GACCTTCGGGGCCGGAGCAGCACTGCAGATTCCATTCGCCA |
| | TGCAGATGGCCTATAGATTCAACGGCATTGGCGTCACACAG |
| | AACGTGCTGTACGAAAACCAGAAGCTCATCGCTAACCAGT |
| | TTAATTCCGCAATTGGAAAGATCCAAGATTCACTCAGCTCA |
| | ACCGCCTCTGCACTCGGAAAGCTGCAGGACGTGGTCAACC |
| | AGAATGCTCAGGCCCTGAACACACTCGTCAAGCAGCTGTCC |
| | TCTAACTTTGGCGCTATCAGCTCCGTTCTGAACGACATTCT |
| | GGCACGCCTGGATAAGGTGGAGGCTGAAGTCCAGATTGAC |
| | CGCCTGATTACCGGCCGGCTGCAGTCTCTGCAAACATACGT |
| | GACCCAGCAGCTGATCAGAGCAGCCGAGATCCGGGCATCC |
| | GCAAATCTGGCAGCAACTAAGATGAGCGAATGCGTGCTGG |
| | GCCAGTCCAAGCGGGTGGACTTTTGTGGCAAGGGCTACCA |
| | CCTGATGAGCTTCCCCCAGAGCGCCCCACATGGCGTTGTTT |
| | TTCTGCACGTGACCTATGTCCCTGCTCAGGAAAAGAACTTT |
| | ACAACTGCTCCTGCTATCTGCCATGACGGCAAGGCCCACTT |
| | CCCACGGGAGGGAGTGTTTGTGTCCAATGGCACACACTGGT |
| | TCGTGACCCAGAGGAACTTCTATGAACCCCAGATCATCACC |
| | ACTCACAATACCTTCGTGTCTGGAAATTGCGACGTCGTGAT |
| | CGGCATCGTTAACAACACCGTGTACGACCCTCTCCAGCCAG |
| | AGCTGGACTCCTTTAAGGAGGAACTGGATAAGTATTTTAAG |
| | AACCACACAAGCCCAGATGTGGATCTCGGGGACATCTCCG |
| | GAATTAACGCCTCCGTGGTGAATATCCAGAAGGAGATTGA |
| | CCGCCTAAATGAAGTTGCCAAGAACCTCAATGAGTCTCTGA |
| | TTGATCTGCAGGAACTGGGCAAGTATGAGCAGTATATCAA |
| | ATGGCCCTGGTACATTTGGCTGGGGTTTATCGCCGGACTGA |
| | TTGCCATCGTCATGGTGACCATCATGCTGTGTTGCATGACC |
| | TCCTGTTGTTCCTGTCTGAAGGGCTGCTGTAGTTGCGGCTCT |
| | TGCTGTAAATTCGACGAAGATGATAGCGAGCCCGTGCTGA |
| | AGGGCGTGAAGCTGCATTATACCTGA |
| SARS-CoV-2 S protein | (SEQ ID NO: 151) |
| mutated to contain the | MFVFLVLLPLVSSQCVNLTTRTQLPPAYTNSFTRGVYYPDKVF |
| H69-, V70-, Y144-, | RSSVLHSTQDLFLPFFSNVTWFHAISGTNGTKRFDNPVLPFND |
| N501Y, A570D, D614G, | GVYFASTEKSNIIRGWIFGTTLDSKTQSLLIVNNATNVVIKVCE |
| P681H, T716I, S982A | FQFCNDPFLGVYHKNNKSWMESEFRVYSSANNCTFEYVSQPF |
| and D1118H mutations | LMDLEGKQGNFKNLREFVFKNIDGYFKIYSKHTPINLVRDLPQ |
| | GFSALEPLVDLPIGINITRFQTLLALHRSYLTPGDSSSGWTAGA |
| | AAYYVGYLQPRTFLLKYNENGTITDAVDCALDPLSETKCTLK |
| | SFTVEKGIYQTSNFRVQPTESIVRFPNITNLCPFGEVFNATRFAS |
| | VYAWNRKRISNCVADYSVLYNSASFSTFKCYGVSPTKLNDLC |
| | FTNVYADSFVIRGDEVRQIAPGQTGKIADYNYKLPDDFTGCVI |
| | AWNSNNLDSKVGGNYNYLYRLFRKSNLKPFERDISTEIYQAG |
| | STPCNGVEGFNCYFPLQSYGFQPTYGVGYQPYRVVVLSFELL |
| | HAPATVCGPKKSTNLVKNKCVNFNFNGLTGTGVLTESNKKFL |
| | PFQQFGRDIDDTTDAVRDPQTLEILDITPCSFGGVSVITPGTNTS |
| | NQVAVLYQGVNCTEVPVAIHADQLTPTWRVYSTGSNVFQTR |
| | AGCLIGAEHVNNSYECDIPIGAGICASYQTQTNSHRRARSVAS |
| | QSIIAYTMSLGAENSVAYSNNSIAIPINFTISVTTEILPVSMTKTS |
| | VDCTMYICGDSTECSNLLLQYGSFCTQLNRALTGIAVEQDKN |
| | TQEVFAQVKQIYKTPPIKDFGGFNFSQILPDPSKPSKRSFIEDLL |
| | FNKVTLADAGFIKQYGDCLGDIAARDLICAQKFNGLTVLPPLL |
| | TDEMIAQYTSALLAGTITSGWTFGAGAALQIPFAMQMAYRFN |
| | GIGVTQNVLYENQKLIANQFNSAIGKIQDSLSSTASALGKLQD |
| | VVNQNAQALNTLVKQLSSNFGAISSVLNDILARLDKVEAEVQI |
| | DRLITGRLQSLQTYVTQQLIRAAEIRASANLAATKMSECVLGQ |
| | SKRVDFCGKGYHLMSFPQSAPHGVVFLHVTYVPAQEKNFTTA |
| | PAICHDGKAHFPREGVFVSNGTHWFVTQRNFYEPQIITTHNTF |
| | VSGNCDVVIGIVNNTVYDPLQPELDSFKEELDKYFKNHTSPDV |
| | DLGDISGINASVVNIQKEIDRLNEVAKNLNESLIDLQELGKYEQ |
| | YIKWPWYIWLGFIAGLIAIVMVTIMLCCMTSCCSCLKGCCSCG |
| | SCCKFDEDDSEPVLKGVKLHYT* |
| Optimized nucleotide | (SEQ ID NO: 152) |
| sequence encoding a | ATGTTCGTCTTCCTCGTGCTGCTCCCACTCGTTTCTTCCCAG |
| SARS-CoV-2 S protein | TGTGTCAACCTGACAACTAGGACTCAGCTGCCACCAGCCTA |
| with residues 986 and | CACCAACTCCTTCACCAGAGGCGTGTATTACCCAGACAAGG |
| 987 mutated to proline | TGTTTAGAAGCAGCGTGCTGCACTCTACCCAGGACCTCTTT |
| and which contains the | CTGCCCTTTTTCAGCAACGTGACATGGTTTCACGCAATTTCC |
| H69-, V70-, Y144-, | GGCACTAATGGCACAAAGCGGTTCGACAATCCAGTCCTGC |
| N501Y, A570D, D614G, | CTTTCAACGATGGCGTCTACTTTGCATCTACTGAGAAATCC |
| P681H, T716I, S982A | AATATCATTAGGGGATGGATCTTCGGCACAACCCTGGATTC |
| and D1118H mutations | TAAGACCCAGAGCCTGCTGATCGTCAACAACGCCACAAAC |
| | GTGGTCATTAAGGTTTGCGAGTTTCAGTTCTGTAACGATCC |
| | TTTTCTGGGCGTTTACCATAAGAACAATAAGAGCTGGATGG |
| | AGTCCGAGTTTAGAGTGTATAGCTCTGCAAATAATTGTACC |
| | TTTGAGTACGTGAGCCAGCCCTTTCTGATGGACCTGGAGGG |
| | AAAACAAGGAAACTTCAAAAACCTGCGGGAATTCGTTTTC |
| | AAAAACATCGACGGCTATTTCAAGATCTATAGCAAGCATA |
| | CCCCAATCAACCTCGTGAGGGACCTCCCCCAGGGCTTTAGC |
| | GCACTGGAGCCACTGGTTGACCTGCCTATCGGCATTAATAT |
| | CACAAGATTTCAGACCCTGCTGGCACTGCATAGAAGCTATC |
| | TGACCCCTGGAGACTCCTCTAGTGGGTGGACTGCCGGCGCC |
| | GCTGCCTACTATGTGGGCTATCTGCAGCCACGGACATTCCT |
| | GCTGAAATACAATGAGAACGGGACAATCACAGATGCTGTT |
| | GATTGCGCACTCGACCCCCTGTCCGAGACAAAGTGCACTCT |
| | CAAGAGCTTTACCGTCGAGAAGGGCATCTATCAGACCTCA |
| | AACTTCAGGGTGCAGCCCACAGAATCTATCGTGCGCTTCCC |
| | TAATATCACTAACCTGTGTCCTTTCGGTGAAGTGTTCAACG |
| | CCACCAGGTTTGCTAGCGTGTATGCCTGGAACAGGAAGAG |
| | GATCTCTAACTGCGTCGCCGACTATTCCGTGCTGTATAACA |
| | GCGCCTCCTTCTCCACATTCAAATGCTATGGAGTGAGCCCG |
| | ACAAAACTGAACGATCTCTGCTTTACAAATGTCTACGCCGA |
| | CTCTTTTGTGATCAGAGGGGACGAGGTCCGGCAGATCGCAC |
| | CAGGACAGACAGGCAAGATTGCTGACTACAACTATAAGCT |
| | GCCTGACGACTTCACAGGATGTGTGATCGCATGGAACTCAA |
| | ACAATCTGGACTCCAAAGTCGGGGGCAACTATAATTACCTG |
| | TATCGCCTGTTCCGGAAGTCCAACCTGAAGCCCTTCGAGAG |
| | GGACATCAGTACAGAGATCTATCAGGCTGGCTCCACCCCTT |
| | GCAATGGCGTCGAAGGCTTTAATTGTTATTTTCCCCTGCAG |
| | TCTTACGGGTTTCAGCCTACTTATGGAGTTGGGTACCAGCC |
| | ATACAGAGTGGTCGTGCTCAGCTTCGAGCTCCTGCATGCTC |
| | CAGCTACAGTTTGCGGGCCAAAGAAGTCCACTAACCTGGT |
| | GAAGAATAAGTGCGTCAACTTCAACTTTAACGGGCTCACCG |
| | GCACCGGCGTGCTGACTGAGAGCAACAAGAAGTTTCTGCC |
| | ATTTCAACAGTTTGGACGGGACATTGATGACACCACCGAT |
| | GCCGTTCGGGATCCACAGACCCTGGAAATTCTGGACATTAC |
| | ACCGTGCAGCTTCGGGGGCGTGAGCGTGATCACACCCGGA |
| | ACCAATACAAGCAACCAGGTTGCCGTCCTGTATCAGGGAG |
| | TCAATTGCACAGAAGTGCCAGTTGCTATCCACGCAGACCAG |
| | CTGACTCCCACATGGCGGGTGTATAGCACCGGATCCAACGT |
| | GTTTCAGACCCGCGCCGGATGTCTCATTGGGGCCGAGCACG |
| | TGAATAACAGCTACGAGTGCGACATCCCCATTGGCGCCGG |
| | CATTTGTGCGTCTTACCAGACTCAGACCAACTCTCATAGAA |
| | GGGCCAGGTCCGTTGCTAGTCAGTCTATTATTGCCTATACC |
| | ATGAGCCTCGGAGCTGAGAATAGCGTGGCCTACTCCAATA |
| | ATTCCATCGCAATCCCTATAAACTTCACTATTTCTGTGACC |
| | ACCGAGATCCTGCCTGTGTCTATGACTAAGACTAGCGTTGA |
| | TTGTACCATGTATATTTGTGGCGACTCTACCGAATGTTCTA |
| | ACCTGCTGCTTCAGTACGGCTCATTTTGCACACAGCTGAAC |
| | AGAGCCCTGACTGGGATCGCTGTGGAGCAGGACAAGAACA |
| | CACAGGAGGTGTTTGCACAGGTGAAGCAGATCTATAAGAC |
| | CCCTCCTATTAAGGATTTCGGCGGATTCAATTTCTCACAGA |
| | TTCTGCCAGACCCCAGTAAGCCTTCCAAGAGGAGCTTCATC |
| | GAGGATCTCCTGTTTAACAAGGTGACCCTGGCAGACGCCG |
| | GCTTTATTAAGCAATATGGGGATTGCCTGGGCGACATTGCT |
| | GCCAGAGACCTGATTTGCGCCCAGAAATTCAATGGCCTCAC |
| | AGTGCTGCCACCTCTGCTGACCGACGAGATGATCGCTCAAT |
| | ACACTAGCGCACTGCTGGCCGGAACCATCACATCAGGCTG |
| | GACCTTCGGGGCCGGAGCAGCACTGCAGATTCCATTCGCCA |
| | TGCAGATGGCCTATAGATTCAACGGCATTGGCGTCACACAG |
| | AACGTGCTGTACGAAAACCAGAAGCTCATCGCTAACCAGT |
| | TTAATTCCGCAATTGGAAAGATCCAAGATTCACTCAGCTCA |
| | ACCGCCTCTGCACTCGGAAAGCTGCAGGACGTGGTCAACC |
| | AGAATGCTCAGGCCCTGAACACACTCGTCAAGCAGCTGTCC |
| | TCTAACTTTGGCGCTATCAGCTCCGTTCTGAACGACATTCT |
| | GGCACGCCTGGATCCCCCAGAGGCTGAAGTCCAGATTGAC |
| | CGCCTGATTACCGGCCGGCTGCAGTCTCTGCAAACATACGT |
| | GACCCAGCAGCTGATCAGAGCAGCCGAGATCCGGGCATCC |
| | GCAAATCTGGCAGCAACTAAGATGAGCGAATGCGTGCTGG |
| | GCCAGTCCAAGCGGGTGGACTTTTGTGGCAAGGGCTACCA |
| | CCTGATGAGCTTCCCCCAGAGCGCCCCACATGGCGTTGTTT |
| | TTCTGCACGTGACCTATGTCCCTGCTCAGGAAAAGAACTTT |
| | ACAACTGCTCCTGCTATCTGCCATGACGGCAAGGCCCACTT |
| | CCCACGGGAGGGAGTGTTTGTGTCCAATGGCACACACTGGT |
| | TCGTGACCCAGAGGAACTTCTATGAACCCCAGATCATCACC |
| | ACTCACAATACCTTCGTGTCTGGAAATTGCGACGTCGTGAT |
| | CGGCATCGTTAACAACACCGTGTACGACCCTCTCCAGCCAG |
| | AGCTGGACTCCTTTAAGGAGGAACTGGATAAGTATTTTAAG |
| | AACCACACAAGCCCAGATGTGGATCTCGGGGACATCTCCG |
| | GAATTAACGCCTCCGTGGTGAATATCCAGAAGGAGATTGA |
| | CCGCCTAAATGAAGTTGCCAAGAACCTCAATGAGTCTCTGA |
| | TTGATCTGCAGGAACTGGGCAAGTATGAGCAGTATATCAA |
| | ATGGCCCTGGTACATTTGGCTGGGGTTTATCGCCGGACTGA |
| | TTGCCATCGTCATGGTGACCATCATGCTGTGTTGCATGACC |
| | TCCTGTTGTTCCTGTCTGAAGGGCTGCTGTAGTTGCGGCTCT |
| | TGCTGTAAATTCGACGAAGATGATAGCGAGCCCGTGCTGA |
| | AGGGCGTGAAGCTGCATTATACCTGA |
| SARS-CoV-2 S protein | (SEQ ID NO: 153) |
| with residues 986 and | MFVFLVLLPLVSSQCVNLTTRTQLPPAYTNSFTRGVYYPDKVF |
| 987 mutated to proline | RSSVLHSTQDLFLPFFSNVTWFHAISGTNGTKRFDNPVLPFND |
| and which contains the | GVYFASTEKSNIIRGWIFGTTLDSKTQSLLIVNNATNVVIKVCE |
| H69-, V70-, Y144-, | FQFCNDPFLGVYHKNNKSWMESEFRVYSSANNCTFEYVSQPF |
| N501Y, A570D, D614G, | LMDLEGKQGNFKNLREFVFKNIDGYFKIYSKHTPINLVRDLPQ |
| P681H, T716I, S982A | GFSALEPLVDLPIGINITRFQTLLALHRSYLTPGDSSSGWTAGA |
| and D1118H mutations | AAYYVGYLQPRTFLLKYNENGTITDAVDCALDPLSETKCTLK |
| | SFTVEKGIYQTSNFRVQPTESIVRFPNITNLCPFGEVFNATRFAS |
| | VYAWNRKRISNCVADYSVLYNSASFSTFKCYGVSPTKLNDLC |
| | FTNVYADSFVIRGDEVRQIAPGQTGKIADYNYKLPDDFTGCVI |
| | AWNSNNLDSKVGGNYNYLYRLFRKSNLKPFERDISTEIYQAG |
| | STPCNGVEGFNCYFPLQSYGFQPTYGVGYQPYRVVVLSFELL |
| | HAPATVCGPKKSTNLVKNKCVNFNFNGLTGTGVLTESNKKFL |
| | PFQQFGRDIDDTTDAVRDPQTLEILDITPCSFGGVSVITPGTNTS |
| | NQVAVLYQGVNCTEVPVAIHADQLTPTWRVYSTGSNVFQTR |
| | AGCLIGAEHVNNSYECDIPIGAGICASYQTQTNSHRRARSVAS |
| | QSIIAYTMSLGAENSVAYSNNSIAIPINFTISVTTEILPVSMTKTS |
| | VDCTMYICGDSTECSNLLLQYGSFCTQLNRALTGIAVEQDKN |
| | TQEVFAQVKQIYKTPPIKDFGGFNFSQILPDPSKPSKRSFIEDLL |
| | FNKVTLADAGFIKQYGDCLGDIAARDLICAQKFNGLTVLPPLL |
| | TDEMIAQYTSALLAGTITSGWTFGAGAALQIPFAMQMAYRFN |
| | GIGVTQNVLYENQKLIANQFNSAIGKIQDSLSSTASALGKLQD |
| | VVNQNAQALNTLVKQLSSNFGAISSVLNDILARLDPPEAEVQI |
| | DRLITGRLQSLQTYVTQQLIRAAEIRASANLAATKMSECVLGQ |
| | SKRVDFCGKGYHLMSFPQSAPHGVVFLHVTYVPAQEKNFTTA |
| | PAICHDGKAHFPREGVFVSNGTHWFVTQRNFYEPQIITTHNTF |
| | VSGNCDVVIGIVNNTVYDPLQPELDSFKEELDKYFKNHTSPDV |
| | DLGDISGINASVVNIQKEIDRLNEVAKNLNESLIDLQELGKYEQ |
| | YIKWPWYIWLGFIAGLIAIVMVTIMLCCMTSCCSCLKGCCSCG |
| | SCCKFDEDDSEPVLKGVKLHYT |
| Optimized nucleotide | (SEQ ID NO: 154) |
| sequence encoding a | ATGTTCGTCTTCCTCGTGCTGCTCCCACTCGTTTCTTCCCAG |
| SARS-CoV-2 S protein | TGTGTCAACCTGACAACTAGGACTCAGCTGCCACCAGCCTA |
| mutated to remove the | CACCAACTCCTTCACCAGAGGCGTGTATTACCCAGACAAGG |
| furin cleavage site | TGTTTAGAAGCAGCGTGCTGCACTCTACCCAGGACCTCTTT |
| required for activation | CTGCCCTTTTTCAGCAACGTGACATGGTTTCACGCAATTTCC |
| and which contains the | GGCACTAATGGCACAAAGCGGTTCGACAATCCAGTCCTGC |
| H69-, V70-, Y144-, | CTTTCAACGATGGCGTCTACTTTGCATCTACTGAGAAATCC |
| N501Y, A570D, D614G, | AATATCATTAGGGGATGGATCTTCGGCACAACCCTGGATTC |
| P681H, T716I, S982A | TAAGACCCAGAGCCTGCTGATCGTCAACAACGCCACAAAC |
| and D1118H mutations | GTGGTCATTAAGGTTTGCGAGTTTCAGTTCTGTAACGATCC |
| | TTTTCTGGGCGTTTACCATAAGAACAATAAGAGCTGGATGG |
| | AGTCCGAGTTTAGAGTGTATAGCTCTGCAAATAATTGTACC |
| | TTTGAGTACGTGAGCCAGCCCTTTCTGATGGACCTGGAGGG |
| | AAAACAAGGAAACTTCAAAAACCTGCGGGAATTCGTTTTC |
| | AAAAACATCGACGGCTATTTCAAGATCTATAGCAAGCATA |
| | CCCCAATCAACCTCGTGAGGGACCTCCCCCAGGGCTTTAGC |
| | GCACTGGAGCCACTGGTTGACCTGCCTATCGGCATTAATAT |
| | CACAAGATTTCAGACCCTGCTGGCACTGCATAGAAGCTATC |
| | TGACCCCTGGAGACTCCTCTAGTGGGTGGACTGCCGGCGCC |
| | GCTGCCTACTATGTGGGCTATCTGCAGCCACGGACATTCCT |
| | GCTGAAATACAATGAGAACGGGACAATCACAGATGCTGTT |
| | GATTGCGCACTCGACCCCCTGTCCGAGACAAAGTGCACTCT |
| | CAAGAGCTTTACCGTCGAGAAGGGCATCTATCAGACCTCA |
| | AACTTCAGGGTGCAGCCCACAGAATCTATCGTGCGCTTCCC |
| | TAATATCACTAACCTGTGTCCTTTCGGTGAAGTGTTCAACG |
| | CCACCAGGTTTGCTAGCGTGTATGCCTGGAACAGGAAGAG |
| | GATCTCTAACTGCGTCGCCGACTATTCCGTGCTGTATAACA |
| | GCGCCTCCTTCTCCACATTCAAATGCTATGGAGTGAGCCCG |
| | ACAAAACTGAACGATCTCTGCTTTACAAATGTCTACGCCGA |
| | CTCTTTTGTGATCAGAGGGGACGAGGTCCGGCAGATCGCAC |
| | CAGGACAGACAGGCAAGATTGCTGACTACAACTATAAGCT |
| | GCCTGACGACTTCACAGGATGTGTGATCGCATGGAACTCAA |
| | ACAATCTGGACTCCAAAGTCGGGGGCAACTATAATTACCTG |
| | TATCGCCTGTTCCGGAAGTCCAACCTGAAGCCCTTCGAGAG |
| | GGACATCAGTACAGAGATCTATCAGGCTGGCTCCACCCCTT |
| | GCAATGGCGTCGAAGGCTTTAATTGTTATTTTCCCCTGCAG |
| | TCTTACGGGTTTCAGCCTACTTATGGAGTTGGGTACCAGCC |
| | ATACAGAGTGGTCGTGCTCAGCTTCGAGCTCCTGCATGCTC |
| | CAGCTACAGTTTGCGGGCCAAAGAAGTCCACTAACCTGGT |
| | GAAGAATAAGTGCGTCAACTTCAACTTTAACGGGCTCACCG |
| | GCACCGGCGTGCTGACTGAGAGCAACAAGAAGTTTCTGCC |
| | ATTTCAACAGTTTGGACGGGACATTGATGACACCACCGAT |
| | GCCGTTCGGGATCCACAGACCCTGGAAATTCTGGACATTAC |
| | ACCGTGCAGCTTCGGGGGCGTGAGCGTGATCACACCCGGA |
| | ACCAATACAAGCAACCAGGTTGCCGTCCTGTATCAGGGAG |
| | TCAATTGCACAGAAGTGCCAGTTGCTATCCACGCAGACCAG |
| | CTGACTCCCACATGGCGGGTGTATAGCACCGGATCCAACGT |
| | GTTTCAGACCCGCGCCGGATGTCTCATTGGGGCCGAGCACG |
| | TGAATAACAGCTACGAGTGCGACATCCCCATTGGCGCCGG |
| | CATTTGTGCGTCTTACCAGACTCAGACCAACTCTCATGGCT |
| | CCGCCTCTTCCGTTGCTAGTCAGTCTATTATTGCCTATACCA |
| | TGAGCCTCGGAGCTGAGAATAGCGTGGCCTACTCCAATAAT |
| | TCCATCGCAATCCCTATAAACTTCACTATTTCTGTGACCAC |
| | CGAGATCCTGCCTGTGTCTATGACTAAGACTAGCGTTGATT |
| | GTACCATGTATATTTGTGGCGACTCTACCGAATGTTCTAAC |
| | CTGCTGCTTCAGTACGGCTCATTTTGCACACAGCTGAACAG |
| | AGCCCTGACTGGGATCGCTGTGGAGCAGGACAAGAACACA |
| | CAGGAGGTGTTTGCACAGGTGAAGCAGATCTATAAGACCC |
| | CTCCTATTAAGGATTTCGGCGGATTCAATTTCTCACAGATT |
| | CTGCCAGACCCCAGTAAGCCTTCCAAGAGGAGCTTCATCGA |
| | GGATCTCCTGTTTAACAAGGTGACCCTGGCAGACGCCGGCT |
| | TTATTAAGCAATATGGGGATTGCCTGGGCGACATTGCTGCC |
| | AGAGACCTGATTTGCGCCCAGAAATTCAATGGCCTCACAGT |
| | GCTGCCACCTCTGCTGACCGACGAGATGATCGCTCAATACA |
| | CTAGCGCACTGCTGGCCGGAACCATCACATCAGGCTGGAC |
| | CTTCGGGGCCGGAGCAGCACTGCAGATTCCATTCGCCATGC |
| | AGATGGCCTATAGATTCAACGGCATTGGCGTCACACAGAA |
| | CGTGCTGTACGAAAACCAGAAGCTCATCGCTAACCAGTTTA |
| | ATTCCGCAATTGGAAAGATCCAAGATTCACTCAGCTCAACC |
| | GCCTCTGCACTCGGAAAGCTGCAGGACGTGGTCAACCAGA |
| | ATGCTCAGGCCCTGAACACACTCGTCAAGCAGCTGTCCTCT |
| | AACTTTGGCGCTATCAGCTCCGTTCTGAACGACATTCTGGC |
| | ACGCCTGGATAAGGTGGAGGCTGAAGTCCAGATTGACCGC |
| | CTGATTACCGGCCGGCTGCAGTCTCTGCAAACATACGTGAC |
| | CCAGCAGCTGATCAGAGCAGCCGAGATCCGGGCATCCGCA |
| | AATCTGGCAGCAACTAAGATGAGCGAATGCGTGCTGGGCC |
| | AGTCCAAGCGGGTGGACTTTTGTGGCAAGGGCTACCACCTG |
| | ATGAGCTTCCCCCAGAGCGCCCCACATGGCGTTGTTTTTCT |
| | GCACGTGACCTATGTCCCTGCTCAGGAAAAGAACTTTACAA |
| | CTGCTCCTGCTATCTGCCATGACGGCAAGGCCCACTTCCCA |
| | CGGGAGGGAGTGTTTGTGTCCAATGGCACACACTGGTTCGT |
| | GACCCAGAGGAACTTCTATGAACCCCAGATCATCACCACTC |
| | ACAATACCTTCGTGTCTGGAAATTGCGACGTCGTGATCGGC |
| | ATCGTTAACAACACCGTGTACGACCCTCTCCAGCCAGAGCT |
| | GGACTCCTTTAAGGAGGAACTGGATAAGTATTTTAAGAACC |
| | ACACAAGCCCAGATGTGGATCTCGGGGACATCTCCGGAAT |
| | TAACGCCTCCGTGGTGAATATCCAGAAGGAGATTGACCGC |
| | CTAAATGAAGTTGCCAAGAACCTCAATGAGTCTCTGATTGA |
| | TCTGCAGGAACTGGGCAAGTATGAGCAGTATATCAAATGG |
| | CCCTGGTACATTTGGCTGGGGTTTATCGCCGGACTGATTGC |
| | CATCGTCATGGTGACCATCATGCTGTGTTGCATGACCTCCT |
| | GTTGTTCCTGTCTGAAGGGCTGCTGTAGTTGCGGCTCTTGCT |
| | GTAAATTCGACGAAGATGATAGCGAGCCCGTGCTGAAGGG |
| | CGTGAAGCTGCATTATACCTGA |
| SARS-CoV-2 S protein | (SEQ ID NO: 155) |
| mutated to remove the | MFVFLVLLPLVSSQCVNLTTRTQLPPAYTNSFTRGVYYPDKVF |
| furin cleavage site | RSSVLHSTQDLFLPFFSNVTWFHAISGTNGTKRFDNPVLPFND |
| required for activation | GVYFASTEKSNIIRGWIFGTTLDSKTQSLLIVNNATNVVIKVCE |
| and which contains the | FQFCNDPFLGVYHKNNKSWMESEFRVYSSANNCTFEYVSQPF |
| H69-, V70-, Y144-, | LMDLEGKQGNFKNLREFVFKNIDGYFKIYSKHTPINLVRDLPQ |
| N501Y, A570D, D614G, | GFSALEPLVDLPIGINITRFQTLLALHRSYLTPGDSSSGWTAGA |
| P681H, T716I, S982A | AAYYVGYLQPRTFLLKYNENGTITDAVDCALDPLSETKCTLK |
| and D1118H mutations | SFTVEKGIYQTSNFRVQPTESIVRFPNITNLCPFGEVFNATRFAS |
| | VYAWNRKRISNCVADYSVLYNSASFSTFKCYGVSPTKLNDLC |
| | FTNVYADSFVIRGDEVRQIAPGQTGKIADYNYKLPDDFTGCVI |
| | AWNSNNLDSKVGGNYNYLYRLFRKSNLKPFERDISTEIYQAG |
| | STPCNGVEGFNCYFPLQSYGFQPTYGVGYQPYRVVVLSFELL |
| | HAPATVCGPKKSTNLVKNKCVNFNFNGLTGTGVLTESNKKFL |
| | PFQQFGRDIDDTTDAVRDPQTLEILDITPCSFGGVSVITPGTNTS |
| | NQVAVLYQGVNCTEVPVAIHADQLTPTWRVYSTGSNVFQTR |
| | AGCLIGAEHVNNSYECDIPIGAGICASYQTQTNSHGSASSVAS |
| | QSIIAYTMSLGAENSVAYSNNSIAIPINFTISVTTEILPVSMTKTS |
| | VDCTMYICGDSTECSNLLLQYGSFCTQLNRALTGIAVEQDKN |
| | TQEVFAQVKQIYKTPPIKDFGGFNFSQILPDPSKPSKRSFIEDLL |
| | FNKVTLADAGFIKQYGDCLGDIAARDLICAQKFNGLTVLPPLL |
| | TDEMIAQYTSALLAGTITSGWTFGAGAALQIPFAMQMAYRFN |
| | GIGVTQNVLYENQKLIANQFNSAIGKIQDSLSSTASALGKLQD |
| | VVNQNAQALNTLVKQLSSNFGAISSVLNDILARLDKVEAEVQI |
| | DRLITGRLQSLQTYVTQQLIRAAEIRASANLAATKMSECVLGQ |
| | SKRVDFCGKGYHLMSFPQSAPHGVVFLHVTYVPAQEKNFTTA |
| | PAICHDGKAHFPREGVFVSNGTHWFVTQRNFYEPQIITTHNTF |
| | VSGNCDVVIGIVNNTVYDPLQPELDSFKEELDKYFKNHTSPDV |
| | DLGDISGINASVVNIQKEIDRLNEVAKNLNESLIDLQELGKYEQ |
| | YIKWPWYIWLGFIAGLIAIVMVTIMLCCMTSCCSCLKGCCSCG |
| | SCCKFDEDDSEPVLKGVKLHYT |
| Optimized nucleotide | (SEQ ID NO: 156) |
| sequence encoding a | ATGTTCGTCTTCCTCGTGCTGCTCCCACTCGTTTCTTCCCAG |
| SARS-CoV-2 S protein | TGTGTCAACCTGACAACTAGGACTCAGCTGCCACCAGCCTA |
| mutated to remove a | CACCAACTCCTTCACCAGAGGCGTGTATTACCCAGACAAGG |
| furin cleavage site and | TGTTTAGAAGCAGCGTGCTGCACTCTACCCAGGACCTCTTT |
| to replace residues 986 | CTGCCCTTTTTCAGCAACGTGACATGGTTTCACGCAATTTCC |
| and 987 with proline | GGCACTAATGGCACAAAGCGGTTCGACAATCCAGTCCTGC |
| and which contains the | CTTTCAACGATGGCGTCTACTTTGCATCTACTGAGAAATCC |
| H69-, V70-, Y144-, | AATATCATTAGGGGATGGATCTTCGGCACAACCCTGGATTC |
| N501Y, A570D, D614G, | TAAGACCCAGAGCCTGCTGATCGTCAACAACGCCACAAAC |
| P681H, T716I, S982A | GTGGTCATTAAGGTTTGCGAGTTTCAGTTCTGTAACGATCC |
| and D1118H mutations | TTTTCTGGGCGTTTACCATAAGAACAATAAGAGCTGGATGG |
| | AGTCCGAGTTTAGAGTGTATAGCTCTGCAAATAATTGTACC |
| | TTTGAGTACGTGAGCCAGCCCTTTCTGATGGACCTGGAGGG |
| | AAAACAAGGAAACTTCAAAAACCTGCGGGAATTCGTTTTC |
| | AAAAACATCGACGGCTATTTCAAGATCTATAGCAAGCATA |
| | CCCCAATCAACCTCGTGAGGGACCTCCCCCAGGGCTTTAGC |
| | GCACTGGAGCCACTGGTTGACCTGCCTATCGGCATTAATAT |
| | CACAAGATTTCAGACCCTGCTGGCACTGCATAGAAGCTATC |
| | TGACCCCTGGAGACTCCTCTAGTGGGTGGACTGCCGGCGCC |
| | GCTGCCTACTATGTGGGCTATCTGCAGCCACGGACATTCCT |
| | GCTGAAATACAATGAGAACGGGACAATCACAGATGCTGTT |
| | GATTGCGCACTCGACCCCCTGTCCGAGACAAAGTGCACTCT |
| | CAAGAGCTTTACCGTCGAGAAGGGCATCTATCAGACCTCA |
| | AACTTCAGGGTGCAGCCCACAGAATCTATCGTGCGCTTCCC |
| | TAATATCACTAACCTGTGTCCTTTCGGTGAAGTGTTCAACG |
| | CCACCAGGTTTGCTAGCGTGTATGCCTGGAACAGGAAGAG |
| | GATCTCTAACTGCGTCGCCGACTATTCCGTGCTGTATAACA |
| | GCGCCTCCTTCTCCACATTCAAATGCTATGGAGTGAGCCCG |
| | ACAAAACTGAACGATCTCTGCTTTACAAATGTCTACGCCGA |
| | CTCTTTTGTGATCAGAGGGGACGAGGTCCGGCAGATCGCAC |
| | CAGGACAGACAGGCAAGATTGCTGACTACAACTATAAGCT |
| | GCCTGACGACTTCACAGGATGTGTGATCGCATGGAACTCAA |
| | ACAATCTGGACTCCAAAGTCGGGGGCAACTATAATTACCTG |
| | TATCGCCTGTTCCGGAAGTCCAACCTGAAGCCCTTCGAGAG |
| | GGACATCAGTACAGAGATCTATCAGGCTGGCTCCACCCCTT |
| | GCAATGGCGTCGAAGGCTTTAATTGTTATTTTCCCCTGCAG |
| | TCTTACGGGTTTCAGCCTACTTATGGAGTTGGGTACCAGCC |
| | ATACAGAGTGGTCGTGCTCAGCTTCGAGCTCCTGCATGCTC |
| | CAGCTACAGTTTGCGGGCCAAAGAAGTCCACTAACCTGGT |
| | GAAGAATAAGTGCGTCAACTTCAACTTTAACGGGCTCACCG |
| | GCACCGGCGTGCTGACTGAGAGCAACAAGAAGTTTCTGCC |
| | ATTTCAACAGTTTGGACGGGACATTGATGACACCACCGAT |
| | GCCGTTCGGGATCCACAGACCCTGGAAATTCTGGACATTAC |
| | ACCGTGCAGCTTCGGGGGCGTGAGCGTGATCACACCCGGA |
| | ACCAATACAAGCAACCAGGTTGCCGTCCTGTATCAGGGAG |
| | TCAATTGCACAGAAGTGCCAGTTGCTATCCACGCAGACCAG |
| | CTGACTCCCACATGGCGGGTGTATAGCACCGGATCCAACGT |
| | GTTTCAGACCCGCGCCGGATGTCTCATTGGGGCCGAGCACG |
| | TGAATAACAGCTACGAGTGCGACATCCCCATTGGCGCCGG |
| | CATTTGTGCGTCTTACCAGACTCAGACCAACTCTCATGGCT |
| | CCGCCTCTTCCGTTGCTAGTCAGTCTATTATTGCCTATACCA |
| | TGAGCCTCGGAGCTGAGAATAGCGTGGCCTACTCCAATAAT |
| | TCCATCGCAATCCCTATAAACTTCACTATTTCTGTGACCAC |
| | CGAGATCCTGCCTGTGTCTATGACTAAGACTAGCGTTGATT |
| | GTACCATGTATATTTGTGGCGACTCTACCGAATGTTCTAAC |
| | CTGCTGCTTCAGTACGGCTCATTTTGCACACAGCTGAACAG |
| | AGCCCTGACTGGGATCGCTGTGGAGCAGGACAAGAACACA |
| | CAGGAGGTGTTTGCACAGGTGAAGCAGATCTATAAGACCC |
| | CTCCTATTAAGGATTTCGGCGGATTCAATTTCTCACAGATT |
| | CTGCCAGACCCCAGTAAGCCTTCCAAGAGGAGCTTCATCGA |
| | GGATCTCCTGTTTAACAAGGTGACCCTGGCAGACGCCGGCT |
| | TTATTAAGCAATATGGGGATTGCCTGGGCGACATTGCTGCC |
| | AGAGACCTGATTTGCGCCCAGAAATTCAATGGCCTCACAGT |
| | GCTGCCACCTCTGCTGACCGACGAGATGATCGCTCAATACA |
| | CTAGCGCACTGCTGGCCGGAACCATCACATCAGGCTGGAC |
| | CTTCGGGGCCGGAGCAGCACTGCAGATTCCATTCGCCATGC |
| | AGATGGCCTATAGATTCAACGGCATTGGCGTCACACAGAA |
| | CGTGCTGTACGAAAACCAGAAGCTCATCGCTAACCAGTTTA |
| | ATTCCGCAATTGGAAAGATCCAAGATTCACTCAGCTCAACC |
| | GCCTCTGCACTCGGAAAGCTGCAGGACGTGGTCAACCAGA |
| | ATGCTCAGGCCCTGAACACACTCGTCAAGCAGCTGTCCTCT |
| | AACTTTGGCGCTATCAGCTCCGTTCTGAACGACATTCTGGC |
| | ACGCCTGGATCCCCCAGAGGCTGAAGTCCAGATTGACCGC |
| | CTGATTACCGGCCGGCTGCAGTCTCTGCAAACATACGTGAC |
| | CCAGCAGCTGATCAGAGCAGCCGAGATCCGGGCATCCGCA |
| | AATCTGGCAGCAACTAAGATGAGCGAATGCGTGCTGGGCC |
| | AGTCCAAGCGGGTGGACTTTTGTGGCAAGGGCTACCACCTG |
| | ATGAGCTTCCCCCAGAGCGCCCCACATGGCGTTGTTTTTCT |
| | GCACGTGACCTATGTCCCTGCTCAGGAAAAGAACTTTACAA |
| | CTGCTCCTGCTATCTGCCATGACGGCAAGGCCCACTTCCCA |
| | CGGGAGGGAGTGTTTGTGTCCAATGGCACACACTGGTTCGT |
| | GACCCAGAGGAACTTCTATGAACCCCAGATCATCACCACTC |
| | ACAATACCTTCGTGTCTGGAAATTGCGACGTCGTGATCGGC |
| | ATCGTTAACAACACCGTGTACGACCCTCTCCAGCCAGAGCT |
| | GGACTCCTTTAAGGAGGAACTGGATAAGTATTTTAAGAACC |
| | ACACAAGCCCAGATGTGGATCTCGGGGACATCTCCGGAAT |
| | TAACGCCTCCGTGGTGAATATCCAGAAGGAGATTGACCGC |
| | CTAAATGAAGTTGCCAAGAACCTCAATGAGTCTCTGATTGA |
| | TCTGCAGGAACTGGGCAAGTATGAGCAGTATATCAAATGG |
| | CCCTGGTACATTTGGCTGGGGTTTATCGCCGGACTGATTGC |
| | CATCGTCATGGTGACCATCATGCTGTGTTGCATGACCTCCT |
| | GTTGTTCCTGTCTGAAGGGCTGCTGTAGTTGCGGCTCTTGCT |
| | GTAAATTCGACGAAGATGATAGCGAGCCCGTGCTGAAGGG |
| | CGTGAAGCTGCATTATACCTGA |
| SARS-CoV-2 S protein | (SEQ ID NO: 157) |
| mutated to remove a | MFVFLVLLPLVSSQCVNLTTRTQLPPAYTNSFTRGVYYPDKVF |
| furin cleavage site and | RSSVLHSTQDLFLPFFSNVTWFHAISGTNGTKRFDNPVLPFND |
| to replace residues 986 | GVYFASTEKSNIIRGWIFGTTLDSKTQSLLIVNNATNVVIKVCE |
| and 987 with proline | FQFCNDPFLGVYHKNNKSWMESEFRVYSSANNCTFEYVSQPF |
| and which contains the | LMDLEGKQGNFKNLREFVFKNIDGYFKIYSKHTPINLVRDLPQ |
| H69-, V70-, Y144-, | GFSALEPLVDLPIGINITRFQTLLALHRSYLTPGDSSSGWTAGA |
| N501Y, A570D, D614G, | AAYYVGYLQPRTFLLKYNENGTITDAVDCALDPLSETKCTLK |
| P681H, T716I, S982A | SFTVEKGIYQTSNFRVQPTESIVRFPNITNLCPFGEVFNATRFAS |
| and D1118H mutations | VYAWNRKRISNCVADYSVLYNSASFSTFKCYGVSPTKLNDLC |
| | FTNVYADSFVIRGDEVRQIAPGQTGKIADYNYKLPDDFTGCVI |
| | AWNSNNLDSKVGGNYNYLYRLFRKSNLKPFERDISTEIYQAG |
| | STPCNGVEGFNCYFPLQSYGFQPTYGVGYQPYRVVVLSFELL |
| | HAPATVCGPKKSTNLVKNKCVNFNFNGLTGTGVLTESNKKFL |
| | PFQQFGRDIDDTTDAVRDPQTLEILDITPCSFGGVSVITPGTNTS |
| | NQVAVLYQGVNCTEVPVAIHADQLTPTWRVYSTGSNVFQTR |
| | AGCLIGAEHVNNSYECDIPIGAGICASYQTQTNSHGSASSVAS |
| | QSIIAYTMSLGAENSVAYSNNSIAIPINFTISVTTEILPVSMTKTS |
| | VDCTMYICGDSTECSNLLLQYGSFCTQLNRALTGIAVEQDKN |
| | TQEVFAQVKQIYKTPPIKDFGGFNFSQILPDPSKPSKRSFIEDLL |
| | FNKVTLADAGFIKQYGDCLGDIAARDLICAQKFNGLTVLPPLL |
| | TDEMIAQYTSALLAGTITSGWTFGAGAALQIPFAMQMAYRFN |
| | GIGVTQNVLYENQKLIANQFNSAIGKIQDSLSSTASALGKLQD |
| | VVNQNAQALNTLVKQLSSNFGAISSVLNDILARLDPPEAEVQI |
| | DRLITGRLQSLQTYVTQQLIRAAEIRASANLAATKMSECVLGQ |
| | SKRVDFCGKGYHLMSFPQSAPHGVVFLHVTYVPAQEKNFTTA |
| | PAICHDGKAHFPREGVFVSNGTHWFVTQRNFYEPQIITTHNTF |
| | VSGNCDVVIGIVNNTVYDPLQPELDSFKEELDKYFKNHTSPDV |
| | DLGDISGINASVVNIQKEIDRLNEVAKNLNESLIDLQELGKYEQ |
| | YIKWPWYIWLGFIAGLIAIVMVTIMLCCMTSCCSCLKGCCSCG |
| | SCCKFDEDDSEPVLKGVKLHYT |
| Optimized nucleotide | (SEQ ID NO: 158) |
| sequence encoding a | ATGTTCGTCTTCCTCGTGCTGCTCCCACTCGTTTCTTCCCAG |
| SARS-CoV-2 S protein | TGTGTCAACCTGACAACTAGGACTCAGCTGCCACCAGCCTA |
| mutated to remove a | CACCAACTCCTTCACCAGAGGCGTGTATTACCCAGACAAGG |
| furin cleavage site and | TGTTTAGAAGCAGCGTGCTGCACTCTACCCAGGACCTCTTT |
| to replace residues 817, | CTGCCCTTTTTCAGCAACGTGACATGGTTTCACGCAATTTCC |
| 892, 899 and 942, 986 | GGCACTAATGGCACAAAGCGGTTCGACAATCCAGTCCTGC |
| and 987 with proline | CTTTCAACGATGGCGTCTACTTTGCATCTACTGAGAAATCC |
| and which contains the | AATATCATTAGGGGATGGATCTTCGGCACAACCCTGGATTC |
| H69-, V70-, Y144-, | TAAGACCCAGAGCCTGCTGATCGTCAACAACGCCACAAAC |
| N501Y, A570D, D614G, | GTGGTCATTAAGGTTTGCGAGTTTCAGTTCTGTAACGATCC |
| P681H, T716I, S982A | TTTTCTGGGCGTTTACCATAAGAACAATAAGAGCTGGATGG |
| and D1118H mutations | AGTCCGAGTTTAGAGTGTATAGCTCTGCAAATAATTGTACC |
| | TTTGAGTACGTGAGCCAGCCCTTTCTGATGGACCTGGAGGG |
| | AAAACAAGGAAACTTCAAAAACCTGCGGGAATTCGTTTTC |
| | AAAAACATCGACGGCTATTTCAAGATCTATAGCAAGCATA |
| | CCCCAATCAACCTCGTGAGGGACCTCCCCCAGGGCTTTAGC |
| | GCACTGGAGCCACTGGTTGACCTGCCTATCGGCATTAATAT |
| | CACAAGATTTCAGACCCTGCTGGCACTGCATAGAAGCTATC |
| | TGACCCCTGGAGACTCCTCTAGTGGGTGGACTGCCGGCGCC |
| | GCTGCCTACTATGTGGGCTATCTGCAGCCACGGACATTCCT |
| | GCTGAAATACAATGAGAACGGGACAATCACAGATGCTGTT |
| | GATTGCGCACTCGACCCCCTGTCCGAGACAAAGTGCACTCT |
| | CAAGAGCTTTACCGTCGAGAAGGGCATCTATCAGACCTCA |
| | AACTTCAGGGTGCAGCCCACAGAATCTATCGTGCGCTTCCC |
| | TAATATCACTAACCTGTGTCCTTTCGGTGAAGTGTTCAACG |
| | CCACCAGGTTTGCTAGCGTGTATGCCTGGAACAGGAAGAG |
| | GATCTCTAACTGCGTCGCCGACTATTCCGTGCTGTATAACA |
| | GCGCCTCCTTCTCCACATTCAAATGCTATGGAGTGAGCCCG |
| | ACAAAACTGAACGATCTCTGCTTTACAAATGTCTACGCCGA |
| | CTCTTTTGTGATCAGAGGGGACGAGGTCCGGCAGATCGCAC |
| | CAGGACAGACAGGCAAGATTGCTGACTACAACTATAAGCT |
| | GCCTGACGACTTCACAGGATGTGTGATCGCATGGAACTCAA |
| | ACAATCTGGACTCCAAAGTCGGGGGCAACTATAATTACCTG |
| | TATCGCCTGTTCCGGAAGTCCAACCTGAAGCCCTTCGAGAG |
| | GGACATCAGTACAGAGATCTATCAGGCTGGCTCCACCCCTT |
| | GCAATGGCGTCGAAGGCTTTAATTGTTATTTTCCCCTGCAG |
| | TCTTACGGGTTTCAGCCTACTTATGGAGTTGGGTACCAGCC |
| | ATACAGAGTGGTCGTGCTCAGCTTCGAGCTCCTGCATGCTC |
| | CAGCTACAGTTTGCGGGCCAAAGAAGTCCACTAACCTGGT |
| | GAAGAATAAGTGCGTCAACTTCAACTTTAACGGGCTCACCG |
| | GCACCGGCGTGCTGACTGAGAGCAACAAGAAGTTTCTGCC |
| | ATTTCAACAGTTTGGACGGGACATTGATGACACCACCGAT |
| | GCCGTTCGGGATCCACAGACCCTGGAAATTCTGGACATTAC |
| | ACCGTGCAGCTTCGGGGGCGTGAGCGTGATCACACCCGGA |
| | ACCAATACAAGCAACCAGGTTGCCGTCCTGTATCAGGGCG |
| | TCAATTGCACAGAAGTGCCAGTTGCTATCCACGCAGACCAG |
| | CTGACTCCCACATGGCGGGTGTATAGCACCGGATCCAACGT |
| | GTTTCAGACCCGCGCCGGATGTCTCATTGGGGCCGAGCACG |
| | TGAATAACAGCTACGAGTGCGACATCCCCATTGGCGCCGG |
| | CATTTGTGCGTCTTACCAGACTCAGACCAACTCTCATGGCT |
| | CCGCCTCTTCCGTTGCTAGTCAGTCTATTATTGCCTATACCA |
| | TGAGCCTCGGAGCTGAGAATAGCGTGGCCTACTCCAATAAT |
| | TCCATCGCAATCCCTATAAACTTCACTATTTCTGTGACCAC |
| | CGAGATCCTGCCTGTGTCTATGACTAAGACTAGCGTTGATT |
| | GTACCATGTATATTTGTGGCGACTCTACCGAATGTTCTAAC |
| | CTGCTGCTTCAGTACGGCTCATTTTGCACACAGCTGAACAG |
| | AGCCCTGACTGGGATCGCTGTGGAGCAGGACAAGAACACA |
| | CAGGAGGTGTTTGCACAGGTGAAGCAGATCTATAAGACCC |
| | CTCCTATTAAGGATTTCGGCGGATTCAATTTCTCACAGATT |
| | CTGCCAGACCCCAGTAAGCCTTCCAAGAGGAGCCCTATCG |
| | AGGATCTCCTGTTTAACAAGGTGACCCTGGCAGACGCCGGC |
| | TTTATTAAGCAATATGGGGATTGCCTGGGCGACATTGCTGC |
| | CAGAGACCTGATTTGCGCCCAGAAATTCAATGGCCTCACAG |
| | TGCTGCCACCTCTGCTGACCGACGAGATGATCGCTCAATAC |
| | ACTAGCGCACTGCTGGCCGGAACCATCACATCAGGCTGGA |
| | CCTTCGGGGCCGGACCAGCACTGCAGATTCCATTCCCTATG |
| | CAGATGGCCTATAGATTCAACGGCATTGGCGTCACACAGA |
| | ACGTGCTGTACGAAAACCAGAAGCTCATCGCTAACCAGTTT |
| | AATTCCGCAATTGGAAAGATCCAAGATTCACTCAGCTCAAC |
| | CCCCTCTGCACTCGGAAAGCTGCAGGACGTGGTCAACCAG |
| | AATGCTCAGGCCCTGAACACACTCGTCAAGCAGCTGTCCTC |
| | TAACTTTGGCGCTATCAGCTCCGTTCTGAACGACATTCTGG |
| | CACGCCTGGATCCCCCAGAGGCTGAAGTCCAGATTGACCG |
| | CCTGATTACCGGCCGGCTGCAGTCTCTGCAAACATACGTGA |
| | CCCAGCAGCTGATCAGAGCAGCCGAGATCCGGGCATCCGC |
| | AAATCTGGCAGCAACTAAGATGAGCGAATGCGTGCTGGGC |
| | CAGTCCAAGCGGGTGGACTTTTGTGGCAAGGGCTACCACCT |
| | GATGAGCTTCCCCCAGAGCGCCCCACATGGCGTTGTTTTTC |
| | TGCACGTGACCTATGTCCCTGCTCAGGAAAAGAACTTTACA |
| | ACTGCTCCTGCTATCTGCCATGACGGCAAGGCCCACTTCCC |
| | ACGGGAGGGAGTGTTTGTGTCCAATGGCACACACTGGTTCG |
| | TGACCCAGAGGAACTTCTATGAACCCCAGATCATCACCACT |
| | CACAATACCTTCGTGTCTGGAAATTGCGACGTCGTGATCGG |
| | CATCGTTAACAACACCGTGTACGACCCTCTCCAGCCAGAGC |
| | TGGACTCCTTTAAGGAGGAACTGGATAAGTATTTTAAGAAC |
| | CACACAAGCCCAGATGTGGATCTCGGGGACATCTCCGGAA |
| | TTAACGCCTCCGTGGTGAATATCCAGAAGGAGATTGACCGC |
| | CTAAATGAAGTTGCCAAGAACCTCAATGAGTCTCTGATTGA |
| | TCTGCAGGAACTGGGCAAGTATGAGCAGTATATCAAATGG |
| | CCCTGGTACATTTGGCTGGGGTTTATCGCCGGACTGATTGC |
| | CATCGTCATGGTGACCATCATGCTGTGTTGCATGACCTCCT |
| | GTTGTTCCTGTCTGAAGGGCTGCTGTAGTTGCGGCTCTTGCT |
| | GTAAATTCGACGAAGATGATAGCGAGCCCGTGCTGAAGGG |
| | CGTGAAGCTGCATTATACCTGA |
| SARS-CoV-2 S protein | (SEQ ID NO: 159) |
| mutated to remove a | MFVFLVLLPLVSSQCVNLTTRTQLPPAYTNSFTRGVYYPDKVF |
| furin cleavage site and | RSSVLHSTQDLFLPFFSNVTWFHAISGTNGTKRFDNPVLPFND |
| to replace residues 817, | GVYFASTEKSNIIRGWIFGTTLDSKTQSLLIVNNATNVVIKVCE |
| 892, 899 and 942, 986 | FQFCNDPFLGVYHKNNKSWMESEFRVYSSANNCTFEYVSQPF |
| and 987 with proline | LMDLEGKQGNFKNLREFVFKNIDGYFKIYSKHTPINLVRDLPQ |
| and which contains the | GFSALEPLVDLPIGINITRFQTLLALHRSYLTPGDSSSGWTAGA |
| H69-, V70-, Y144-, | AAYYVGYLQPRTFLLKYNENGTITDAVDCALDPLSETKCTLK |
| N501Y, A570D, D614G, | SFTVEKGIYQTSNFRVQPTESIVRFPNITNLCPFGEVENATRFAS |
| P681H, T716I, S982A | VYAWNRKRISNCVADYSVLYNSASFSTFKCYGVSPTKLNDLC |
| and D1118H mutations | FTNVYADSFVIRGDEVRQIAPGQTGKIADYNYKLPDDFTGCVI |
| | AWNSNNLDSKVGGNYNYLYRLFRKSNLKPFERDISTEIYQAG |
| | STPCNGVEGFNCYFPLQSYGFQPTYGVGYQPYRVVVLSFELL |
| | HAPATVCGPKKSTNLVKNKCVNFNFNGLTGTGVLTESNKKFL |
| | PFQQFGRDIDDTTDAVRDPQTLEILDITPCSFGGVSVITPGTNTS |
| | NQVAVLYQGVNCTEVPVAIHADQLTPTWRVYSTGSNVFQTR |
| | AGCLIGAEHVNNSYECDIPIGAGICASYQTQTNSHGSASSVAS |
| | QSIIAYTMSLGAENSVAYSNNSIAIPINFTISVTTEILPVSMTKTS |
| | VDCTMYICGDSTECSNLLLQYGSFCTQLNRALTGIAVEQDKN |
| | TQEVFAQVKQIYKTPPIKDFGGFNFSQILPDPSKPSKRSPIEDLL |
| | FNKVTLADAGFIKQYGDCLGDIAARDLICAQKFNGLTVLPPLL |
| | TDEMIAQYTSALLAGTITSGWTFGAGPALQIPFPMQMAYRFN |
| | GIGVTQNVLYENQKLIANQFNSAIGKIQDSLSSTPSALGKLQD |
| | VVNQNAQALNTLVKQLSSNFGAISSVLNDILARLDPPEAEVQI |
| | DRLITGRLQSLQTYVTQQLIRAAEIRASANLAATKMSECVLGQ |
| | SKRVDFCGKGYHLMSFPQSAPHGVVFLHVTYVPAQEKNFTTA |
| | PAICHDGKAHFPREGVFVSNGTHWFVTQRNFYEPQIITTHNTF |
| | VSGNCDVVIGIVNNTVYDPLQPELDSFKEELDKYFKNHTSPDV |
| | DLGDISGINASVVNIQKEIDRLNEVAKNLNESLIDLQELGKYEQ |
| | YIKWPWYIWLGFIAGLIAIVMVTIMLCCMTSCCSCLKGCCSCG |
| | SCCKFDEDDSEPVLKGVKLHYT |
| Optimized nucleotide | (SEQ ID NO: 160) |
| sequence encoding a | ATGTTCGTCTTCCTCGTGCTGCTCCCACTCGTTTCTTCCCAG |
| SARS-CoV-2 S protein | TGTGTCAACCTGACAACTAGGACTCAGCTGCCACCAGCCTA |
| containing the D80A, | CACCAACTCCTTCACCAGAGGCGTGTATTACCCAGACAAGG |
| D215G, L242-, A243-, | TGTTTAGAAGCAGCGTGCTGCACTCTACCCAGGACCTCTTT |
| L244-, K417N, E484K, | CTGCCCTTTTTCAGCAACGTGACATGGTTTCACGCAATTCA |
| N501Y, D614G and | CGTGTCCGGCACTAATGGCACAAAGCGGTTCGCCAATCCA |
| A701V mutations | GTCCTGCCTTTCAACGATGGCGTCTACTTTGCATCTACTGA |
| | GAAATCCAATATCATTAGGGGATGGATCTTCGGCACAACCC |
| | TGGATTCTAAGACCCAGAGCCTGCTGATCGTCAACAACGCC |
| | ACAAACGTGGTCATTAAGGTTTGCGAGTTTCAGTTCTGTAA |
| | CGATCCTTTTCTGGGCGTGTATTATCATAAGAACAATAAGA |
| | GCTGGATGGAGTCCGAGTTTAGAGTGTATAGCTCTGCAAAT |
| | AATTGTACCTTTGAGTACGTGAGCCAGCCCTTTCTGATGGA |
| | CCTGGAGGGAAAACAAGGAAACTTCAAAAACCTGCGGGAA |
| | TTCGTTTTCAAAAACATCGACGGCTATTTCAAGATCTATAG |
| | CAAGCATACCCCAATCAACCTCGTGAGGGGCCTCCCCCAG |
| | GGCTTTAGCGCACTGGAGCCACTGGTTGACCTGCCTATCGG |
| | CATTAATATCACAAGATTTCAGACCCTGCATAGAAGCTATC |
| | TGACCCCTGGAGACTCCTCTAGTGGGTGGACTGCCGGCGCC |
| | GCTGCCTACTATGTGGGCTATCTGCAGCCACGGACATTCCT |
| | GCTGAAATACAATGAGAACGGGACAATCACAGATGCTGTT |
| | GATTGCGCACTCGACCCCCTGTCCGAGACAAAGTGCACTCT |
| | CAAGAGCTTTACCGTCGAGAAGGGCATCTATCAGACCTCA |
| | AACTTCAGGGTGCAGCCCACAGAATCTATCGTGCGCTTCCC |
| | TAATATCACTAACCTGTGTCCTTTCGGTGAAGTGTTCAACG |
| | CCACCAGGTTTGCTAGCGTGTATGCCTGGAACAGGAAGAG |
| | GATCTCTAACTGCGTCGCCGACTATTCCGTGCTGTATAACA |
| | GCGCCTCCTTCTCCACATTCAAATGCTATGGAGTGAGCCCG |
| | ACAAAACTGAACGATCTCTGCTTTACAAATGTCTACGCCGA |
| | CTCTTTTGTGATCAGAGGGGACGAGGTCCGGCAGATCGCAC |
| | CAGGACAGACAGGCAACATTGCTGACTACAACTATAAGCT |
| | GCCTGACGACTTCACAGGATGTGTGATCGCATGGAACTCAA |
| | ACAATCTGGACTCCAAAGTCGGGGGCAACTATAATTACCTG |
| | TATCGCCTGTTCCGGAAGTCCAACCTGAAGCCCTTCGAGAG |
| | GGACATCAGTACAGAGATCTATCAGGCTGGCTCCACCCCTT |
| | GCAATGGCGTCAAGGGCTTTAATTGTTATTTTCCCCTGCAG |
| | TCTTACGGGTTTCAGCCTACTTACGGAGTTGGGTACCAGCC |
| | ATACAGAGTGGTCGTGCTCAGCTTCGAGCTCCTGCATGCTC |
| | CAGCTACAGTTTGCGGGCCAAAGAAGTCCACTAACCTGGT |
| | GAAGAATAAGTGCGTCAACTTCAACTTTAACGGGCTCACCG |
| | GCACCGGCGTGCTGACTGAGAGCAACAAGAAGTTTCTGCC |
| | ATTTCAACAGTTTGGACGGGACATTGCCGACACCACCGATG |
| | CCGTTCGGGATCCACAGACCCTGGAAATTCTGGACATTACA |
| | CCGTGCAGCTTCGGGGGCGTGAGCGTGATCACACCCGGAA |
| | CCAATACAAGCAACCAGGTTGCCGTCCTGTATCAGGGCGT |
| | CAATTGCACAGAAGTGCCAGTTGCTATCCACGCAGACCAG |
| | CTGACTCCCACATGGCGGGTGTATAGCACCGGATCCAACGT |
| | GTTTCAGACCCGCGCCGGATGTCTCATTGGGGCCGAGCACG |
| | TGAATAACAGCTACGAGTGCGACATCCCCATTGGCGCCGG |
| | CATTTGTGCGTCTTACCAGACTCAGACCAACTCTCCTAGAA |
| | GGGCCAGGTCCGTTGCTAGTCAGTCTATTATTGCCTATACC |
| | ATGAGCCTCGGAGTGGAGAATAGCGTGGCCTACTCCAATA |
| | ATTCCATCGCAATCCCTACTAACTTCACTATTTCTGTGACCA |
| | CCGAGATCCTGCCTGTGTCTATGACTAAGACTAGCGTTGAT |
| | TGTACCATGTATATTTGTGGCGACTCTACCGAATGTTCTAA |
| | CCTGCTGCTTCAGTACGGCTCATTTTGCACACAGCTGAACA |
| | GAGCCCTGACTGGGATCGCTGTGGAGCAGGACAAGAACAC |
| | ACAGGAGGTGTTTGCACAGGTGAAGCAGATCTATAAGACC |
| | CCTCCTATTAAGGATTTCGGCGGATTCAATTTCTCACAGAT |
| | TCTGCCAGACCCCAGTAAGCCTTCCAAGAGGAGCTTCATCG |
| | AGGATCTCCTGTTTAACAAGGTGACCCTGGCAGACGCCGGC |
| | TTTATTAAGCAATATGGGGATTGCCTGGGCGACATTGCTGC |
| | CAGAGACCTGATTTGCGCCCAGAAATTCAATGGCCTCACAG |
| | TGCTGCCACCTCTGCTGACCGACGAGATGATCGCTCAATAC |
| | ACTAGCGCACTGCTGGCCGGAACCATCACATCAGGCTGGA |
| | CCTTCGGGGCCGGAGCAGCACTGCAGATTCCATTCGCCATG |
| | CAGATGGCCTATAGATTCAACGGCATTGGCGTCACACAGA |
| | ACGTGCTGTACGAAAACCAGAAGCTCATCGCTAACCAGTTT |
| | AATTCCGCAATTGGAAAGATCCAAGATTCACTCAGCTCAAC |
| | CGCCTCTGCACTCGGAAAGCTGCAGGACGTGGTCAACCAG |
| | AATGCTCAGGCCCTGAACACACTCGTCAAGCAGCTGTCCTC |
| | TAACTTTGGCGCTATCAGCTCCGTTCTGAACGACATTCTGA |
| | GCCGCCTGGATAAGGTGGAGGCTGAAGTCCAGATTGACCG |
| | CCTGATTACCGGCCGGCTGCAGTCTCTGCAAACATACGTGA |
| | CCCAGCAGCTGATCAGAGCAGCCGAGATCCGGGCATCCGC |
| | AAATCTGGCAGCAACTAAGATGAGCGAATGCGTGCTGGGC |
| | CAGTCCAAGCGGGTGGACTTTTGTGGCAAGGGCTACCACCT |
| | GATGAGCTTCCCCCAGAGCGCCCCACATGGCGTTGTTTTTC |
| | TGCACGTGACCTATGTCCCTGCTCAGGAAAAGAACTTTACA |
| | ACTGCTCCTGCTATCTGCCATGACGGCAAGGCCCACTTCCC |
| | ACGGGAGGGAGTGTTTGTGTCCAATGGCACACACTGGTTCG |
| | TGACCCAGAGGAACTTCTATGAACCCCAGATCATCACCACT |
| | GACAATACCTTCGTGTCTGGAAATTGCGACGTCGTGATCGG |
| | CATCGTTAACAACACCGTGTACGACCCTCTCCAGCCAGAGC |
| | TGGACTCCTTTAAGGAGGAACTGGATAAGTATTTTAAGAAC |
| | CACACAAGCCCAGATGTGGATCTCGGGGACATCTCCGGAA |
| | TTAACGCCTCCGTGGTGAATATCCAGAAGGAGATTGACCGC |
| | CTAAATGAAGTTGCCAAGAACCTCAATGAGTCTCTGATTGA |
| | TCTGCAGGAACTGGGCAAGTATGAGCAGTATATCAAATGG |
| | CCCTGGTACATTTGGCTGGGGTTTATCGCCGGACTGATTGC |
| | CATCGTCATGGTGACCATCATGCTGTGTTGCATGACCTCCT |
| | GTTGTTCCTGTCTGAAGGGCTGCTGTAGTTGCGGCTCTTGCT |
| | GTAAATTCGACGAAGATGATAGCGAGCCCGTGCTGAAGGG |
| | CGTGAAGCTGCATTATACCTGA |
| SARS-CoV-2 S protein | (SEQ ID NO: 161) |
| containing the D80A, | MFVFLVLLPLVSSQCVNLTTRTQLPPAYTNSFTRGVYYPDKVF |
| D215G, L242-, A243-, | RSSVLHSTQDLFLPFFSNVTWFHAIHVSGTNGTKRFANPVLPF |
| L244-, K417N, E484K, | NDGVYFASTEKSNIIRGWIFGTTLDSKTQSLLIVNNATNVVIKV |
| N501Y, D614G and | CEFQFCNDPFLGVYYHKNNKSWMESEFRVYSSANNCTFEYVS |
| A701V mutations | QPFLMDLEGKQGNFKNLREFVFKNIDGYFKIYSKHTPINLVRG |
| | LPQGFSALEPLVDLPIGINITRFQTLHRSYLTPGDSSSGWTAGA |
| | AAYYVGYLQPRTFLLKYNENGTITDAVDCALDPLSETKCTLK |
| | SFTVEKGIYQTSNFRVQPTESIVRFPNITNLCPFGEVFNATRFAS |
| | VYAWNRKRISNCVADYSVLYNSASFSTFKCYGVSPTKLNDLC |
| | FTNVYADSFVIRGDEVRQIAPGQTGNIADYNYKLPDDFTGCVI |
| | AWNSNNLDSKVGGNYNYLYRLFRKSNLKPFERDISTEIYQAG |
| | STPCNGVKGFNCYFPLQSYGFQPTYGVGYQPYRVVVLSFELL |
| | HAPATVCGPKKSTNLVKNKCVNFNFNGLTGTGVLTESNKKFL |
| | PFQQFGRDIADTTDAVRDPQTLEILDITPCSFGGVSVITPGTNTS |
| | NQVAVLYQGVNCTEVPVAIHADQLTPTWRVYSTGSNVFQTR |
| | AGCLIGAEHVNNSYECDIPIGAGICASYQTQTNSPRRARSVAS |
| | QSIIAYTMSLGVENSVAYSNNSIAIPTNFTISVTTEILPVSMTKT |
| | SVDCTMYICGDSTECSNLLLQYGSFCTQLNRALTGIAVEQDK |
| | NTQEVFAQVKQIYKTPPIKDFGGFNFSQILPDPSKPSKRSFIEDL |
| | LFNKVTLADAGFIKQYGDCLGDIAARDLICAQKFNGLTVLPPL |
| | LTDEMIAQYTSALLAGTITSGWTFGAGAALQIPFAMQMAYRF |
| | NGIGVTQNVLYENQKLIANQFNSAIGKIQDSLSSTASALGKLQ |
| | DVVNQNAQALNTLVKQLSSNFGAISSVLNDILSRLDKVEAEV |
| | QIDRLITGRLQSLQTYVTQQLIRAAEIRASANLAATKMSECVL |
| | GQSKRVDFCGKGYHLMSFPQSAPHGVVFLHVTYVPAQEKNF |
| | TTAPAICHDGKAHFPREGVFVSNGTHWFVTQRNFYEPQIITTD |
| | NTFVSGNCDVVIGIVNNTVYDPLQPELDSFKEELDKYFKNHTS |
| | PDVDLGDISGINASVVNIQKEIDRLNEVAKNLNESLIDLQELGK |
| | YEQYIKWPWYIWLGFIAGLIAIVMVTIMLCCMTSCCSCLKGCC |
| | SCGSCCKFDEDDSEPVLKGVKLHYT |
| Optimized nucleotide | (SEQ ID NO: 162) |
| sequence encoding a | ATGTTCGTCTTCCTCGTGCTGCTCCCACTCGTTTCTTCCCAG |
| SARS-CoV-2 S protein | TGTGTCAACCTGACAACTAGGACTCAGCTGCCACCAGCCTA |
| containing mutated to | CACCAACTCCTTCACCAGAGGCGTGTATTACCCAGACAAGG |
| remove a furin cleavage | TGTTTAGAAGCAGCGTGCTGCACTCTACCCAGGACCTCTTT |
| site and to replace | CTGCCCTTTTTCAGCAACGTGACATGGTTTCACGCAATTCA |
| residues 986 and 987 | CGTGTCCGGCACTAATGGCACAAAGCGGTTCGCCAATCCA |
| with proline and which | GTCCTGCCTTTCAACGATGGCGTCTACTTTGCATCTACTGA |
| contains the D80A, | GAAATCCAATATCATTAGGGGATGGATCTTCGGCACAACCC |
| D215G, L242-, A243-, | TGGATTCTAAGACCCAGAGCCTGCTGATCGTCAACAACGCC |
| L244-, K417N, E484K, | ACAAACGTGGTCATTAAGGTTTGCGAGTTTCAGTTCTGTAA |
| N501Y, D614G and | CGATCCTTTTCTGGGCGTGTATTATCATAAGAACAATAAGA |
| A701V mutations | GCTGGATGGAGTCCGAGTTTAGAGTGTATAGCTCTGCAAAT |
| | AATTGTACCTTTGAGTACGTGAGCCAGCCCTTTCTGATGGA |
| | CCTGGAGGGAAAACAAGGAAACTTCAAAAACCTGCGGGAA |
| | TTCGTTTTCAAAAACATCGACGGCTATTTCAAGATCTATAG |
| | CAAGCATACCCCAATCAACCTCGTGAGGGGCCTCCCCCAG |
| | GGCTTTAGCGCACTGGAGCCACTGGTTGACCTGCCTATCGG |
| | CATTAATATCACAAGATTTCAGACCCTGCATAGAAGCTATC |
| | TGACCCCTGGAGACTCCTCTAGTGGGTGGACTGCCGGCGCC |
| | GCTGCCTACTATGTGGGCTATCTGCAGCCACGGACATTCCT |
| | GCTGAAATACAATGAGAACGGGACAATCACAGATGCTGTT |
| | GATTGCGCACTCGACCCCCTGTCCGAGACAAAGTGCACTCT |
| | CAAGAGCTTTACCGTCGAGAAGGGCATCTATCAGACCTCA |
| | AACTTCAGGGTGCAGCCCACAGAATCTATCGTGCGCTTCCC |
| | TAATATCACTAACCTGTGTCCTTTCGGTGAAGTGTTCAACG |
| | CCACCAGGTTTGCTAGCGTGTATGCCTGGAACAGGAAGAG |
| | GATCTCTAACTGCGTCGCCGACTATTCCGTGCTGTATAACA |
| | GCGCCTCCTTCTCCACATTCAAATGCTATGGAGTGAGCCCG |
| | ACAAAACTGAACGATCTCTGCTTTACAAATGTCTACGCCGA |
| | CTCTTTTGTGATCAGAGGGGACGAGGTCCGGCAGATCGCAC |
| | CAGGACAGACAGGCAACATTGCTGACTACAACTATAAGCT |
| | GCCTGACGACTTCACAGGATGTGTGATCGCATGGAACTCAA |
| | ACAATCTGGACTCCAAAGTCGGGGGCAACTATAATTACCTG |
| | TATCGCCTGTTCCGGAAGTCCAACCTGAAGCCCTTCGAGAG |
| | GGACATCAGTACAGAGATCTATCAGGCTGGCTCCACCCCTT |
| | GCAATGGCGTCAAGGGCTTTAATTGTTATTTTCCCCTGCAG |
| | TCTTACGGGTTTCAGCCTACTTACGGAGTTGGGTACCAGCC |
| | ATACAGAGTGGTCGTGCTCAGCTTCGAGCTCCTGCATGCTC |
| | CAGCTACAGTTTGCGGGCCAAAGAAGTCCACTAACCTGGT |
| | GAAGAATAAGTGCGTCAACTTCAACTTTAACGGGCTCACCG |
| | GCACCGGCGTGCTGACTGAGAGCAACAAGAAGTTTCTGCC |
| | ATTTCAACAGTTTGGACGGGACATTGCCGACACCACCGATG |
| | CCGTTCGGGATCCACAGACCCTGGAAATTCTGGACATTACA |
| | CCGTGCAGCTTCGGGGGCGTGAGCGTGATCACACCCGGAA |
| | CCAATACAAGCAACCAGGTTGCCGTCCTGTATCAGGGCGT |
| | CAATTGCACAGAAGTGCCAGTTGCTATCCACGCAGACCAG |
| | CTGACTCCCACATGGCGGGTGTATAGCACCGGATCCAACGT |
| | GTTTCAGACCCGCGCCGGATGTCTCATTGGGGCCGAGCACG |
| | TGAATAACAGCTACGAGTGCGACATCCCCATTGGCGCCGG |
| | CATTTGTGCGTCTTACCAGACTCAGACCAACTCTCCTGGCT |
| | CCGCCTCTTCCGTTGCTAGTCAGTCTATTATTGCCTATACCA |
| | TGAGCCTCGGAGTGGAGAATAGCGTGGCCTACTCCAATAA |
| | TTCCATCGCAATCCCTACTAACTTCACTATTTCTGTGACCAC |
| | CGAGATCCTGCCTGTGTCTATGACTAAGACTAGCGTTGATT |
| | GTACCATGTATATTTGTGGCGACTCTACCGAATGTTCTAAC |
| | CTGCTGCTTCAGTACGGCTCATTTTGCACACAGCTGAACAG |
| | AGCCCTGACTGGGATCGCTGTGGAGCAGGACAAGAACACA |
| | CAGGAGGTGTTTGCACAGGTGAAGCAGATCTATAAGACCC |
| | CTCCTATTAAGGATTTCGGCGGATTCAATTTCTCACAGATT |
| | CTGCCAGACCCCAGTAAGCCTTCCAAGAGGAGCTTCATCGA |
| | GGATCTCCTGTTTAACAAGGTGACCCTGGCAGACGCCGGCT |
| | TTATTAAGCAATATGGGGATTGCCTGGGCGACATTGCTGCC |
| | AGAGACCTGATTTGCGCCCAGAAATTCAATGGCCTCACAGT |
| | GCTGCCACCTCTGCTGACCGACGAGATGATCGCTCAATACA |
| | CTAGCGCACTGCTGGCCGGAACCATCACATCAGGCTGGAC |
| | CTTCGGGGCCGGAGCAGCACTGCAGATTCCATTCGCCATGC |
| | AGATGGCCTATAGATTCAACGGCATTGGCGTCACACAGAA |
| | CGTGCTGTACGAAAACCAGAAGCTCATCGCTAACCAGTTTA |
| | ATTCCGCAATTGGAAAGATCCAAGATTCACTCAGCTCAACC |
| | GCCTCTGCACTCGGAAAGCTGCAGGACGTGGTCAACCAGA |
| | ATGCTCAGGCCCTGAACACACTCGTCAAGCAGCTGTCCTCT |
| | AACTTTGGCGCTATCAGCTCCGTTCTGAACGACATTCTGAG |
| | CCGCCTGGATCCCCCAGAGGCTGAAGTCCAGATTGACCGCC |
| | TGATTACCGGCCGGCTGCAGTCTCTGCAAACATACGTGACC |
| | CAGCAGCTGATCAGAGCAGCCGAGATCCGGGCATCCGCAA |
| | ATCTGGCAGCAACTAAGATGAGCGAATGCGTGCTGGGCCA |
| | GTCCAAGCGGGTGGACTTTTGTGGCAAGGGCTACCACCTGA |
| | TGAGCTTCCCCCAGAGCGCCCCACATGGCGTTGTTTTTCTG |
| | CACGTGACCTATGTCCCTGCTCAGGAAAAGAACTTTACAAC |
| | TGCTCCTGCTATCTGCCATGACGGCAAGGCCCACTTCCCAC |
| | GGGAGGGAGTGTTTGTGTCCAATGGCACACACTGGTTCGTG |
| | ACCCAGAGGAACTTCTATGAACCCCAGATCATCACCACTGA |
| | CAATACCTTCGTGTCTGGAAATTGCGACGTCGTGATCGGCA |
| | TCGTTAACAACACCGTGTACGACCCTCTCCAGCCAGAGCTG |
| | GACTCCTTTAAGGAGGAACTGGATAAGTATTTTAAGAACCA |
| | CACAAGCCCAGATGTGGATCTCGGGGACATCTCCGGAATT |
| | AACGCCTCCGTGGTGAATATCCAGAAGGAGATTGACCGCC |
| | TAAATGAAGTTGCCAAGAACCTCAATGAGTCTCTGATTGAT |
| | CTGCAGGAACTGGGCAAGTATGAGCAGTATATCAAATGGC |
| | CCTGGTACATTTGGCTGGGGTTTATCGCCGGACTGATTGCC |
| | ATCGTCATGGTGACCATCATGCTGTGTTGCATGACCTCCTG |
| | TTGTTCCTGTCTGAAGGGCTGCTGTAGTTGCGGCTCTTGCTG |
| | TAAATTCGACGAAGATGATAGCGAGCCCGTGCTGAAGGGC |
| | GTGAAGCTGCATTATACCTGA |
| SARS-CoV-2 S protein | (SEQ ID NO: 163) |
| containing mutated to | MFVFLVLLPLVSSQCVNLTTRTQLPPAYTNSFTRGVYYPDKVF |
| remove a furin cleavage | RSSVLHSTQDLFLPFFSNVTWFHAIHVSGTNGTKRFANPVLPF |
| site and to replace | NDGVYFASTEKSNIIRGWIFGTTLDSKTQSLLIVNNATNVVIKV |
| residues 986 and 987 | CEFQFCNDPFLGVYYHKNNKSWMESEFRVYSSANNCTFEYVS |
| with proline and which | QPFLMDLEGKQGNFKNLREFVFKNIDGYFKIYSKHTPINLVRG |
| contains the D80A, | LPQGFSALEPLVDLPIGINITRFQTLHRSYLTPGDSSSGWTAGA |
| D215G, L242-, A243-, | AAYYVGYLQPRTFLLKYNENGTITDAVDCALDPLSETKCTLK |
| L244-, K417N, E484K, | SFTVEKGIYQTSNFRVQPTESIVRFPNITNLCPFGEVFNATRFAS |
| N501Y, D614G and | VYAWNRKRISNCVADYSVLYNSASFSTFKCYGVSPTKLNDLC |
| A701V mutations | FTNVYADSFVIRGDEVRQIAPGQTGNIADYNYKLPDDFTGCVI |
| | AWNSNNLDSKVGGNYNYLYRLFRKSNLKPFERDISTEIYQAG |
| | STPCNGVKGFNCYFPLQSYGFQPTYGVGYQPYRVVVLSFELL |
| | HAPATVCGPKKSTNLVKNKCVNFNFNGLTGTGVLTESNKKFL |
| | PFQQFGRDIADTTDAVRDPQTLEILDITPCSFGGVSVITPGTNTS |
| | NQVAVLYQGVNCTEVPVAIHADQLTPTWRVYSTGSNVFQTR |
| | AGCLIGAEHVNNSYECDIPIGAGICASYQTQTNSPGSASSVASQ |
| | SIIAYTMSLGVENSVAYSNNSIAIPTNFTISVTTEILPVSMTKTS |
| | VDCTMYICGDSTECSNLLLQYGSFCTQLNRALTGIAVEQDKN |
| | TQEVFAQVKQIYKTPPIKDFGGFNFSQILPDPSKPSKRSFIEDLL |
| | FNKVTLADAGFIKQYGDCLGDIAARDLICAQKFNGLTVLPPLL |
| | TDEMIAQYTSALLAGTITSGWTFGAGAALQIPFAMQMAYRFN |
| | GIGVTQNVLYENQKLIANQFNSAIGKIQDSLSSTASALGKLQD |
| | VVNQNAQALNTLVKQLSSNFGAISSVLNDILSRLDPPEAEVQI |
| | DRLITGRLQSLQTYVTQQLIRAAEIRASANLAATKMSECVLGQ |
| | SKRVDFCGKGYHLMSFPQSAPHGVVFLHVTYVPAQEKNFTTA |
| | PAICHDGKAHFPREGVFVSNGTHWFVTQRNFYEPQIITTDNTF |
| | VSGNCDVVIGIVNNTVYDPLQPELDSFKEELDKYFKNHTSPDV |
| | DLGDISGINASVVNIQKEIDRLNEVAKNLNESLIDLQELGKYEQ |
| | YIKWPWYIWLGFIAGLIAIVMVTIMLCCMTSCCSCLKGCCSCG |
| | SCCKFDEDDSEPVLKGVKLHYT |
| Optimized nucleotide | (SEQ ID NO: 164) |
| sequence encoding a | ATGTTCGTCTTCCTCGTGCTGCTCCCACTCGTTTCTTCCCAG |
| SARS-CoV-2 S protein | TGTGTCAACTTCACAACTAGGACTCAGCTGCCACCAGCCTA |
| containing the L18F, | CACCAACTCCTTCACCAGAGGCGTGTATTACCCAGACAAGG |
| D80A, D215G, L242-, | TGTTTAGAAGCAGCGTGCTGCACTCTACCCAGGACCTCTTT |
| A243-, L244-, K417N, | CTGCCCTTTTTCAGCAACGTGACATGGTTTCACGCAATTCA |
| E484K, N501Y, D614G | CGTGTCCGGCACTAATGGCACAAAGCGGTTCGCCAATCCA |
| and A701V mutations | GTCCTGCCTTTCAACGATGGCGTCTACTTTGCATCTACTGA |
| | GAAATCCAATATCATTAGGGGATGGATCTTCGGCACAACCC |
| | TGGATTCTAAGACCCAGAGCCTGCTGATCGTCAACAACGCC |
| | ACAAACGTGGTCATTAAGGTTTGCGAGTTTCAGTTCTGTAA |
| | CGATCCTTTTCTGGGCGTGTATTATCATAAGAACAATAAGA |
| | GCTGGATGGAGTCCGAGTTTAGAGTGTATAGCTCTGCAAAT |
| | AATTGTACCTTTGAGTACGTGAGCCAGCCCTTTCTGATGGA |
| | CCTGGAGGGAAAACAAGGAAACTTCAAAAACCTGCGGGAA |
| | TTCGTTTTCAAAAACATCGACGGCTATTTCAAGATCTATAG |
| | CAAGCATACCCCAATCAACCTCGTGAGGGGCCTCCCCCAG |
| | GGCTTTAGCGCACTGGAGCCACTGGTTGACCTGCCTATCGG |
| | CATTAATATCACAAGATTTCAGACCCTGCATAGAAGCTATC |
| | TGACCCCTGGAGACTCCTCTAGTGGGTGGACTGCCGGCGCC |
| | GCTGCCTACTATGTGGGCTATCTGCAGCCACGGACATTCCT |
| | GCTGAAATACAATGAGAACGGGACAATCACAGATGCTGTT |
| | GATTGCGCACTCGACCCCCTGTCCGAGACAAAGTGCACTCT |
| | CAAGAGCTTTACCGTCGAGAAGGGCATCTATCAGACCTCA |
| | AACTTCAGGGTGCAGCCCACAGAATCTATCGTGCGCTTCCC |
| | TAATATCACTAACCTGTGTCCTTTCGGTGAAGTGTTCAACG |
| | CCACCAGGTTTGCTAGCGTGTATGCCTGGAACAGGAAGAG |
| | GATCTCTAACTGCGTCGCCGACTATTCCGTGCTGTATAACA |
| | GCGCCTCCTTCTCCACATTCAAATGCTATGGAGTGAGCCCG |
| | ACAAAACTGAACGATCTCTGCTTTACAAATGTCTACGCCGA |
| | CTCTTTTGTGATCAGAGGGGACGAGGTCCGGCAGATCGCAC |
| | CAGGACAGACAGGCAACATTGCTGACTACAACTATAAGCT |
| | GCCTGACGACTTCACAGGATGTGTGATCGCATGGAACTCAA |
| | ACAATCTGGACTCCAAAGTCGGGGGCAACTATAATTACCTG |
| | TATCGCCTGTTCCGGAAGTCCAACCTGAAGCCCTTCGAGAG |
| | GGACATCAGTACAGAGATCTATCAGGCTGGCTCCACCCCTT |
| | GCAATGGCGTCAAGGGCTTTAATTGTTATTTTCCCCTGCAG |
| | TCTTACGGGTTTCAGCCTACTTACGGAGTTGGGTACCAGCC |
| | ATACAGAGTGGTCGTGCTCAGCTTCGAGCTCCTGCATGCTC |
| | CAGCTACAGTTTGCGGGCCAAAGAAGTCCACTAACCTGGT |
| | GAAGAATAAGTGCGTCAACTTCAACTTTAACGGGCTCACCG |
| | GCACCGGCGTGCTGACTGAGAGCAACAAGAAGTTTCTGCC |
| | ATTTCAACAGTTTGGACGGGACATTGCCGACACCACCGATG |
| | CCGTTCGGGATCCACAGACCCTGGAAATTCTGGACATTACA |
| | CCGTGCAGCTTCGGGGGCGTGAGCGTGATCACACCCGGAA |
| | CCAATACAAGCAACCAGGTTGCCGTCCTGTATCAGGGCGT |
| | CAATTGCACAGAAGTGCCAGTTGCTATCCACGCAGACCAG |
| | CTGACTCCCACATGGCGGGTGTATAGCACCGGATCCAACGT |
| | GTTTCAGACCCGCGCCGGATGTCTCATTGGGGCCGAGCACG |
| | TGAATAACAGCTACGAGTGCGACATCCCCATTGGCGCCGG |
| | CATTTGTGCGTCTTACCAGACTCAGACCAACTCTCCTAGAA |
| | GGGCCAGGTCCGTTGCTAGTCAGTCTATTATTGCCTATACC |
| | ATGAGCCTCGGAGTGGAGAATAGCGTGGCCTACTCCAATA |
| | ATTCCATCGCAATCCCTACTAACTTCACTATTTCTGTGACCA |
| | CCGAGATCCTGCCTGTGTCTATGACTAAGACTAGCGTTGAT |
| | TGTACCATGTATATTTGTGGCGACTCTACCGAATGTTCTAA |
| | CCTGCTGCTTCAGTACGGCTCATTTTGCACACAGCTGAACA |
| | GAGCCCTGACTGGGATCGCTGTGGAGCAGGACAAGAACAC |
| | ACAGGAGGTGTTTGCACAGGTGAAGCAGATCTATAAGACC |
| | CCTCCTATTAAGGATTTCGGCGGATTCAATTTCTCACAGAT |
| | TCTGCCAGACCCCAGTAAGCCTTCCAAGAGGAGCTTCATCG |
| | AGGATCTCCTGTTTAACAAGGTGACCCTGGCAGACGCCGGC |
| | TTTATTAAGCAATATGGGGATTGCCTGGGCGACATTGCTGC |
| | CAGAGACCTGATTTGCGCCCAGAAATTCAATGGCCTCACAG |
| | TGCTGCCACCTCTGCTGACCGACGAGATGATCGCTCAATAC |
| | ACTAGCGCACTGCTGGCCGGAACCATCACATCAGGCTGGA |
| | CCTTCGGGGCCGGAGCAGCACTGCAGATTCCATTCGCCATG |
| | CAGATGGCCTATAGATTCAACGGCATTGGCGTCACACAGA |
| | ACGTGCTGTACGAAAACCAGAAGCTCATCGCTAACCAGTTT |
| | AATTCCGCAATTGGAAAGATCCAAGATTCACTCAGCTCAAC |
| | CGCCTCTGCACTCGGAAAGCTGCAGGACGTGGTCAACCAG |
| | AATGCTCAGGCCCTGAACACACTCGTCAAGCAGCTGTCCTC |
| | TAACTTTGGCGCTATCAGCTCCGTTCTGAACGACATTCTGA |
| | GCCGCCTGGATAAGGTGGAGGCTGAAGTCCAGATTGACCG |
| | CCTGATTACCGGCCGGCTGCAGTCTCTGCAAACATACGTGA |
| | CCCAGCAGCTGATCAGAGCAGCCGAGATCCGGGCATCCGC |
| | AAATCTGGCAGCAACTAAGATGAGCGAATGCGTGCTGGGC |
| | CAGTCCAAGCGGGTGGACTTTTGTGGCAAGGGCTACCACCT |
| | GATGAGCTTCCCCCAGAGCGCCCCACATGGCGTTGTTTTTC |
| | TGCACGTGACCTATGTCCCTGCTCAGGAAAAGAACTTTACA |
| | ACTGCTCCTGCTATCTGCCATGACGGCAAGGCCCACTTCCC |
| | ACGGGAGGGAGTGTTTGTGTCCAATGGCACACACTGGTTCG |
| | TGACCCAGAGGAACTTCTATGAACCCCAGATCATCACCACT |
| | GACAATACCTTCGTGTCTGGAAATTGCGACGTCGTGATCGG |
| | CATCGTTAACAACACCGTGTACGACCCTCTCCAGCCAGAGC |
| | TGGACTCCTTTAAGGAGGAACTGGATAAGTATTTTAAGAAC |
| | CACACAAGCCCAGATGTGGATCTCGGGGACATCTCCGGAA |
| | TTAACGCCTCCGTGGTGAATATCCAGAAGGAGATTGACCGC |
| | CTAAATGAAGTTGCCAAGAACCTCAATGAGTCTCTGATTGA |
| | TCTGCAGGAACTGGGCAAGTATGAGCAGTATATCAAATGG |
| | CCCTGGTACATTTGGCTGGGGTTTATCGCCGGACTGATTGC |
| | CATCGTCATGGTGACCATCATGCTGTGTTGCATGACCTCCT |
| | GTTGTTCCTGTCTGAAGGGCTGCTGTAGTTGCGGCTCTTGCT |
| | GTAAATTCGACGAAGATGATAGCGAGCCCGTGCTGAAGGG |
| | CGTGAAGCTGCATTATACCTGA |
| SARS-CoV-2 S protein | (SEQ ID NO: 165) |
| containing the L18F, | MFVFLVLLPLVSSQCVNFTTRTQLPPAYTNSFTRGVYYPDKVF |
| D80A, D215G, L242-, | RSSVLHSTQDLFLPFFSNVTWFHAIHVSGTNGTKRFANPVLPF |
| A243-, L244-, K417N, | NDGVYFASTEKSNIIRGWIFGTTLDSKTQSLLIVNNATNVVIKV |
| E484K, N501Y, D614G | CEFQFCNDPFLGVYYHKNNKSWMESEFRVYSSANNCTFEYVS |
| and A701V mutations | QPFLMDLEGKQGNFKNLREFVFKNIDGYFKIYSKHTPINLVRG |
| | LPQGFSALEPLVDLPIGINITRFQTLHRSYLTPGDSSSGWTAGA |
| | AAYYVGYLQPRTFLLKYNENGTITDAVDCALDPLSETKCTLK |
| | SFTVEKGIYQTSNFRVQPTESIVRFPNITNLCPFGEVENATRFAS |
| | VYAWNRKRISNCVADYSVLYNSASFSTFKCYGVSPTKLNDLC |
| | FTNVYADSFVIRGDEVRQIAPGQTGNIADYNYKLPDDFTGCVI |
| | AWNSNNLDSKVGGNYNYLYRLFRKSNLKPFERDISTEIYQAG |
| | STPCNGVKGFNCYFPLQSYGFQPTYGVGYQPYRVVVLSFELL |
| | HAPATVCGPKKSTNLVKNKCVNFNFNGLTGTGVLTESNKKFL |
| | PFQQFGRDIADTTDAVRDPQTLEILDITPCSFGGVSVITPGTNTS |
| | NQVAVLYQGVNCTEVPVAIHADQLTPTWRVYSTGSNVFQTR |
| | AGCLIGAEHVNNSYECDIPIGAGICASYQTQTNSPRRARSVAS |
| | QSIIAYTMSLGVENSVAYSNNSIAIPTNFTISVTTEILPVSMTKT |
| | SVDCTMYICGDSTECSNLLLQYGSFCTQLNRALTGIAVEQDK |
| | NTQEVFAQVKQIYKTPPIKDFGGFNFSQILPDPSKPSKRSFIEDL |
| | LFNKVTLADAGFIKQYGDCLGDIAARDLICAQKFNGLTVLPPL |
| | LTDEMIAQYTSALLAGTITSGWTFGAGAALQIPFAMQMAYRF |
| | NGIGVTQNVLYENQKLIANQFNSAIGKIQDSLSSTASALGKLQ |
| | DVVNQNAQALNTLVKQLSSNFGAISSVLNDILSRLDKVEAEV |
| | QIDRLITGRLQSLQTYVTQQLIRAAEIRASANLAATKMSECVL |
| | GQSKRVDFCGKGYHLMSFPQSAPHGVVFLHVTYVPAQEKNF |
| | TTAPAICHDGKAHFPREGVFVSNGTHWFVTQRNFYEPQUITTD |
| | NTFVSGNCDVVIGIVNNTVYDPLQPELDSFKEELDKYFKNHTS |
| | PDVDLGDISGINASVVNIQKEIDRLNEVAKNLNESLIDLQELGK |
| | YEQYIKWPWYIWLGFIAGLIAIVMVTIMLCCMTSCCSCLKGCC |
| | SCGSCCKFDEDDSEPVLKGVKLHYT |
| Optimized nucleotide | (SEQ ID NO: 166) |
| sequence encoding a | ATGTTCGTCTTCCTCGTGCTGCTCCCACTCGTTTCTTCCCAG |
| SARS-CoV-2 S protein | TGTGTCAACTTCACAACTAGGACTCAGCTGCCACCAGCCTA |
| containing mutated to | CACCAACTCCTTCACCAGAGGCGTGTATTACCCAGACAAGG |
| remove a furin cleavage | TGTTTAGAAGCAGCGTGCTGCACTCTACCCAGGACCTCTTT |
| site and to replace | CTGCCCTTTTTCAGCAACGTGACATGGTTTCACGCAATTCA |
| residues 986 and 987 | CGTGTCCGGCACTAATGGCACAAAGCGGTTCGCCAATCCA |
| with proline and which | GTCCTGCCTTTCAACGATGGCGTCTACTTTGCATCTACTGA |
| contains the L18F, | GAAATCCAATATCATTAGGGGATGGATCTTCGGCACAACCC |
| D80A, D215G, L242-, | TGGATTCTAAGACCCAGAGCCTGCTGATCGTCAACAACGCC |
| A243-, L244-, K417N, | ACAAACGTGGTCATTAAGGTTTGCGAGTTTCAGTTCTGTAA |
| E484K, N501Y, D614G | CGATCCTTTTCTGGGCGTGTATTATCATAAGAACAATAAGA |
| and A701V mutations | GCTGGATGGAGTCCGAGTTTAGAGTGTATAGCTCTGCAAAT |
| | AATTGTACCTTTGAGTACGTGAGCCAGCCCTTTCTGATGGA |
| | CCTGGAGGGAAAACAAGGAAACTTCAAAAACCTGCGGGAA |
| | TTCGTTTTCAAAAACATCGACGGCTATTTCAAGATCTATAG |
| | CAAGCATACCCCAATCAACCTCGTGAGGGGCCTCCCCCAG |
| | GGCTTTAGCGCACTGGAGCCACTGGTTGACCTGCCTATCGG |
| | CATTAATATCACAAGATTTCAGACCCTGCATAGAAGCTATC |
| | TGACCCCTGGAGACTCCTCTAGTGGGTGGACTGCCGGCGCC |
| | GCTGCCTACTATGTGGGCTATCTGCAGCCACGGACATTCCT |
| | GCTGAAATACAATGAGAACGGGACAATCACAGATGCTGTT |
| | GATTGCGCACTCGACCCCCTGTCCGAGACAAAGTGCACTCT |
| | CAAGAGCTTTACCGTCGAGAAGGGCATCTATCAGACCTCA |
| | AACTTCAGGGTGCAGCCCACAGAATCTATCGTGCGCTTCCC |
| | TAATATCACTAACCTGTGTCCTTTCGGTGAAGTGTTCAACG |
| | CCACCAGGTTTGCTAGCGTGTATGCCTGGAACAGGAAGAG |
| | GATCTCTAACTGCGTCGCCGACTATTCCGTGCTGTATAACA |
| | GCGCCTCCTTCTCCACATTCAAATGCTATGGAGTGAGCCCG |
| | ACAAAACTGAACGATCTCTGCTTTACAAATGTCTACGCCGA |
| | CTCTTTTGTGATCAGAGGGGACGAGGTCCGGCAGATCGCAC |
| | CAGGACAGACAGGCAACATTGCTGACTACAACTATAAGCT |
| | GCCTGACGACTTCACAGGATGTGTGATCGCATGGAACTCAA |
| | ACAATCTGGACTCCAAAGTCGGGGGCAACTATAATTACCTG |
| | TATCGCCTGTTCCGGAAGTCCAACCTGAAGCCCTTCGAGAG |
| | GGACATCAGTACAGAGATCTATCAGGCTGGCTCCACCCCTT |
| | GCAATGGCGTCAAGGGCTTTAATTGTTATTTTCCCCTGCAG |
| | TCTTACGGGTTTCAGCCTACTTACGGAGTTGGGTACCAGCC |
| | ATACAGAGTGGTCGTGCTCAGCTTCGAGCTCCTGCATGCTC |
| | CAGCTACAGTTTGCGGGCCAAAGAAGTCCACTAACCTGGT |
| | GAAGAATAAGTGCGTCAACTTCAACTTTAACGGGCTCACCG |
| | GCACCGGCGTGCTGACTGAGAGCAACAAGAAGTTTCTGCC |
| | ATTTCAACAGTTTGGACGGGACATTGCCGACACCACCGATG |
| | CCGTTCGGGATCCACAGACCCTGGAAATTCTGGACATTACA |
| | CCGTGCAGCTTCGGGGGCGTGAGCGTGATCACACCCGGAA |
| | CCAATACAAGCAACCAGGTTGCCGTCCTGTATCAGGGCGT |
| | CAATTGCACAGAAGTGCCAGTTGCTATCCACGCAGACCAG |
| | CTGACTCCCACATGGCGGGTGTATAGCACCGGATCCAACGT |
| | GTTTCAGACCCGCGCCGGATGTCTCATTGGGGCCGAGCACG |
| | TGAATAACAGCTACGAGTGCGACATCCCCATTGGCGCCGG |
| | CATTTGTGCGTCTTACCAGACTCAGACCAACTCTCCTGGCT |
| | CCGCCTCTTCCGTTGCTAGTCAGTCTATTATTGCCTATACCA |
| | TGAGCCTCGGAGTGGAGAATAGCGTGGCCTACTCCAATAA |
| | TTCCATCGCAATCCCTACTAACTTCACTATTTCTGTGACCAC |
| | CGAGATCCTGCCTGTGTCTATGACTAAGACTAGCGTTGATT |
| | GTACCATGTATATTTGTGGCGACTCTACCGAATGTTCTAAC |
| | CTGCTGCTTCAGTACGGCTCATTTTGCACACAGCTGAACAG |
| | AGCCCTGACTGGGATCGCTGTGGAGCAGGACAAGAACACA |
| | CAGGAGGTGTTTGCACAGGTGAAGCAGATCTATAAGACCC |
| | CTCCTATTAAGGATTTCGGCGGATTCAATTTCTCACAGATT |
| | CTGCCAGACCCCAGTAAGCCTTCCAAGAGGAGCTTCATCGA |
| | GGATCTCCTGTTTAACAAGGTGACCCTGGCAGACGCCGGCT |
| | TTATTAAGCAATATGGGGATTGCCTGGGCGACATTGCTGCC |
| | AGAGACCTGATTTGCGCCCAGAAATTCAATGGCCTCACAGT |
| | GCTGCCACCTCTGCTGACCGACGAGATGATCGCTCAATACA |
| | CTAGCGCACTGCTGGCCGGAACCATCACATCAGGCTGGAC |
| | CTTCGGGGCCGGAGCAGCACTGCAGATTCCATTCGCCATGC |
| | AGATGGCCTATAGATTCAACGGCATTGGCGTCACACAGAA |
| | CGTGCTGTACGAAAACCAGAAGCTCATCGCTAACCAGTTTA |
| | ATTCCGCAATTGGAAAGATCCAAGATTCACTCAGCTCAACC |
| | GCCTCTGCACTCGGAAAGCTGCAGGACGTGGTCAACCAGA |
| | ATGCTCAGGCCCTGAACACACTCGTCAAGCAGCTGTCCTCT |
| | AACTTTGGCGCTATCAGCTCCGTTCTGAACGACATTCTGAG |
| | CCGCCTGGATCCCCCAGAGGCTGAAGTCCAGATTGACCGCC |
| | TGATTACCGGCCGGCTGCAGTCTCTGCAAACATACGTGACC |
| | CAGCAGCTGATCAGAGCAGCCGAGATCCGGGCATCCGCAA |
| | ATCTGGCAGCAACTAAGATGAGCGAATGCGTGCTGGGCCA |
| | GTCCAAGCGGGTGGACTTTTGTGGCAAGGGCTACCACCTGA |
| | TGAGCTTCCCCCAGAGCGCCCCACATGGCGTTGTTTTTCTG |
| | CACGTGACCTATGTCCCTGCTCAGGAAAAGAACTTTACAAC |
| | TGCTCCTGCTATCTGCCATGACGGCAAGGCCCACTTCCCAC |
| | GGGAGGGAGTGTTTGTGTCCAATGGCACACACTGGTTCGTG |
| | ACCCAGAGGAACTTCTATGAACCCCAGATCATCACCACTGA |
| | CAATACCTTCGTGTCTGGAAATTGCGACGTCGTGATCGGCA |
| | TCGTTAACAACACCGTGTACGACCCTCTCCAGCCAGAGCTG |
| | GACTCCTTTAAGGAGGAACTGGATAAGTATTTTAAGAACCA |
| | CACAAGCCCAGATGTGGATCTCGGGGACATCTCCGGAATT |
| | AACGCCTCCGTGGTGAATATCCAGAAGGAGATTGACCGCC |
| | TAAATGAAGTTGCCAAGAACCTCAATGAGTCTCTGATTGAT |
| | CTGCAGGAACTGGGCAAGTATGAGCAGTATATCAAATGGC |
| | CCTGGTACATTTGGCTGGGGTTTATCGCCGGACTGATTGCC |
| | ATCGTCATGGTGACCATCATGCTGTGTTGCATGACCTCCTG |
| | TTGTTCCTGTCTGAAGGGCTGCTGTAGTTGCGGCTCTTGCTG |
| | TAAATTCGACGAAGATGATAGCGAGCCCGTGCTGAAGGGC |
| | GTGAAGCTGCATTATACCTGA |
| SARS-CoV-2 S protein | (SEQ ID NO: 167) |
| containing mutated to | MFVFLVLLPLVSSQCVNFTTRTQLPPAYTNSFTRGVYYPDKVF |
| remove a furin cleavage | RSSVLHSTQDLFLPFFSNVTWFHAIHVSGTNGTKRFANPVLPF |
| site and to replace | NDGVYFASTEKSNIIRGWIFGTTLDSKTQSLLIVNNATNVVIKV |
| residues 986 and 987 | CEFQFCNDPFLGVYYHKNNKSWMESEFRVYSSANNCTFEYVS |
| with proline and which | QPFLMDLEGKQGNFKNLREFVFKNIDGYFKIYSKHTPINLVRG |
| contains the L18F, | LPQGFSALEPLVDLPIGINITRFQTLHRSYLTPGDSSSGWTAGA |
| D80A, D215G, L242-, | AAYYVGYLQPRTFLLKYNENGTITDAVDCALDPLSETKCTLK |
| A243-, L244-, K417N, | SFTVEKGIYQTSNFRVQPTESIVRFPNITNLCPFGEVFNATRFAS |
| E484K, N501Y, D614G | VYAWNRKRISNCVADYSVLYNSASFSTFKCYGVSPTKLNDLC |
| and A701V mutations | FTNVYADSFVIRGDEVRQIAPGQTGNIADYNYKLPDDFTGCVI |
| | AWNSNNLDSKVGGNYNYLYRLFRKSNLKPFERDISTEIYQAG |
| | STPCNGVKGFNCYFPLQSYGFQPTYGVGYQPYRVVVLSFELL |
| | HAPATVCGPKKSTNLVKNKCVNFNFNGLTGTGVLTESNKKFL |
| | PFQQFGRDIADTTDAVRDPQTLEILDITPCSFGGVSVITPGTNTS |
| | NQVAVLYQGVNCTEVPVAIHADQLTPTWRVYSTGSNVFQTR |
| | AGCLIGAEHVNNSYECDIPIGAGICASYQTQTNSPGSASSVASQ |
| | SIIAYTMSLGVENSVAYSNNSIAIPTNFTISVTTEILPVSMTKTS |
| | VDCTMYICGDSTECSNLLLQYGSFCTQLNRALTGIAVEQDKN |
| | TQEVFAQVKQIYKTPPIKDFGGFNFSQILPDPSKPSKRSFIEDLL |
| | FNKVTLADAGFIKQYGDCLGDIAARDLICAQKFNGLTVLPPLL |
| | TDEMIAQYTSALLAGTITSGWTFGAGAALQIPFAMQMAYRFN |
| | GIGVTQNVLYENQKLIANQFNSAIGKIQDSLSSTASALGKLQD |
| | VVNQNAQALNTLVKQLSSNFGAISSVLNDILSRLDPPEAEVQI |
| | DRLITGRLQSLQTYVTQQLIRAAEIRASANLAATKMSECVLGQ |
| | SKRVDFCGKGYHLMSFPQSAPHGVVFLHVTYVPAQEKNFTTA |
| | PAICHDGKAHFPREGVFVSNGTHWFVTQRNFYEPQIITTDNTF |
| | VSGNCDVVIGIVNNTVYDPLQPELDSFKEELDKYFKNHTSPDV |
| | DLGDISGINASVVNIQKEIDRLNEVAKNLNESLIDLQELGKYEQ |
| | YIKWPWYIWLGFIAGLIAIVMVTIMLCCMTSCCSCLKGCCSCG |
| | SCCKFDEDDSEPVLKGVKLHYT |
| Optimized nucleotide | (SEQ ID NO: 168) |
| sequence encoding a | ATGTTCGTCTTCCTCGTGCTGCTCCCACTCGTTTCTTCCCAG |
| SARS-CoV-2 S protein | TGTGTCAACTTTACAAACAGGACTCAGCTGCCATCCGCCT |
| containing the L18F, | ACACCAACTCCTTCACCAGAGGCGTGTATTACCCAGACAAG |
| T20N, P26S, D138Y, | GTGTTTAGAAGCAGCGTGCTGCACTCTACCCAGGACCTCTT |
| R190S, K417T, E484K, | TCTGCCCTTTTTCAGCAACGTGACATGGTTTCACGCAATTC |
| N501Y, D614G, H655Y, | ACGTGTCCGGCACTAATGGCACAAAGCGGTTCGACAATCC |
| T10271 and V1176F | AGTCCTGCCTTTCAACGATGGCGTCTACTTTGCATCTACTG |
| mutations | AGAAATCCAATATCATTAGGGGATGGATCTTCGGCACAAC |
| | CCTGGATTCTAAGACCCAGAGCCTGCTGATCGTCAACAACG |
| | CCACAAACGTGGTCATTAAGGTTTGCGAGTTTCAGTTCTGT |
| | AACTACCCTTTTCTGGGCGTGTATTATCATAAGAACAATAA |
| | GAGCTGGATGGAGTCCGAGTTTAGAGTGTATAGCTCTGCAA |
| | ATAATTGTACCTTTGAGTACGTGAGCCAGCCCTTTCTGATG |
| | GACCTGGAGGGAAAACAAGGAAACTTCAAAAACCTGAGC |
| | GAATTCGTTTTCAAAAACATCGACGGCTATTTCAAGATCTA |
| | TAGCAAGCATACCCCAATCAACCTCGTGAGGGACCTCCCCC |
| | AGGGCTTTAGCGCACTGGAGCCACTGGTTGACCTGCCTATC |
| | GGCATTAATATCACAAGATTTCAGACCCTGCTGGCACTGCA |
| | TAGAAGCTATCTGACCCCTGGAGACTCCTCTAGTGGGTGGA |
| | CTGCCGGCGCCGCTGCCTACTATGTGGGCTATCTGCAGCCA |
| | CGGACATTCCTGCTGAAATACAATGAGAACGGGACAATCA |
| | CAGATGCTGTTGATTGCGCACTCGACCCCCTGTCCGAGACA |
| | AAGTGCACTCTCAAGAGCTTTACCGTCGAGAAGGGCATCTA |
| | TCAGACCTCAAACTTCAGGGTGCAGCCCACAGAATCTATCG |
| | TGCGCTTCCCTAATATCACTAACCTGTGTCCTTTCGGTGAA |
| | GTGTTCAACGCCACCAGGTTTGCTAGCGTGTATGCCTGGAA |
| | CAGGAAGAGGATCTCTAACTGCGTCGCCGACTATTCCGTGC |
| | TGTATAACAGCGCCTCCTTCTCCACATTCAAATGCTATGGA |
| | GTGAGCCCGACAAAACTGAACGATCTCTGCTTTACAAATGT |
| | CTACGCCGACTCTTTTGTGATCAGAGGGGACGAGGTCCGGC |
| | AGATCGCACCAGGACAGACAGGCACCATTGCTGACTACAA |
| | CTATAAGCTGCCTGACGACTTCACAGGATGTGTGATCGCAT |
| | GGAACTCAAACAATCTGGACTCCAAAGTCGGGGGCAACTA |
| | TAATTACCTGTATCGCCTGTTCCGGAAGTCCAACCTGAAGC |
| | CCTTCGAGAGGGACATCAGTACAGAGATCTATCAGGCTGG |
| | CTCCACCCCTTGCAATGGCGTCAAGGGCTTTAATTGTTATT |
| | TTCCCCTGCAGTCTTACGGGTTTCAGCCTACTTACGGAGTT |
| | GGGTACCAGCCATACAGAGTGGTCGTGCTCAGCTTCGAGCT |
| | CCTGCATGCTCCAGCTACAGTTTGCGGGCCAAAGAAGTCCA |
| | CTAACCTGGTGAAGAATAAGTGCGTCAACTTCAACTTTAAC |
| | GGGCTCACCGGCACCGGCGTGCTGACTGAGAGCAACAAGA |
| | AGTTTCTGCCATTTCAACAGTTTGGACGGGACATTGCCGAC |
| | ACCACCGATGCCGTTCGGGATCCACAGACCCTGGAAATTCT |
| | GGACATTACACCGTGCAGCTTCGGGGGCGTGAGCGTGATC |
| | ACACCCGGAACCAATACAAGCAACCAGGTTGCCGTCCTGT |
| | ATCAGGGCGTCAATTGCACAGAAGTGCCAGTTGCTATCCA |
| | CGCAGACCAGCTGACTCCCACATGGCGGGTGTATAGCACC |
| | GGATCCAACGTGTTTCAGACCCGCGCCGGATGTCTCATTGG |
| | GGCCGAGTACGTGAATAACAGCTACGAGTGCGACATCCCC |
| | ATTGGCGCCGGCATTTGTGCGTCTTACCAGACTCAGACCAA |
| | CTCTCCTAGAAGGGCCAGGTCCGTTGCTAGTCAGTCTATTA |
| | TTGCCTATACCATGAGCCTCGGAGCTGAGAATAGCGTGGCC |
| | TACTCCAATAATTCCATCGCAATCCCTACTAACTTCACTATT |
| | TCTGTGACCACCGAGATCCTGCCTGTGTCTATGACTAAGAC |
| | TAGCGTTGATTGTACCATGTATATTTGTGGCGACTCTACCG |
| | AATGTTCTAACCTGCTGCTTCAGTACGGCTCATTTTGCACA |
| | CAGCTGAACAGAGCCCTGACTGGGATCGCTGTGGAGCAGG |
| | ACAAGAACACACAGGAGGTGTTTGCACAGGTGAAGCAGAT |
| | CTATAAGACCCCTCCTATTAAGGATTTCGGCGGATTCAATT |
| | TCTCACAGATTCTGCCAGACCCCAGTAAGCCTTCCAAGAGG |
| | AGCTTCATCGAGGATCTCCTGTTTAACAAGGTGACCCTGGC |
| | AGACGCCGGCTTTATTAAGCAATATGGGGATTGCCTGGGCG |
| | ACATTGCTGCCAGAGACCTGATTTGCGCCCAGAAATTCAAT |
| | GGCCTCACAGTGCTGCCACCTCTGCTGACCGACGAGATGAT |
| | CGCTCAATACACTAGCGCACTGCTGGCCGGAACCATCACAT |
| | CAGGCTGGACCTTCGGGGCCGGAGCAGCACTGCAGATTCC |
| | ATTCGCCATGCAGATGGCCTATAGATTCAACGGCATTGGCG |
| | TCACACAGAACGTGCTGTACGAAAACCAGAAGCTCATCGC |
| | TAACCAGTTTAATTCCGCAATTGGAAAGATCCAAGATTCAC |
| | TCAGCTCAACCGCCTCTGCACTCGGAAAGCTGCAGGACGTG |
| | GTCAACCAGAATGCTCAGGCCCTGAACACACTCGTCAAGC |
| | AGCTGTCCTCTAACTTTGGCGCTATCAGCTCCGTTCTGAAC |
| | GACATTCTGAGCCGCCTGGATAAGGTGGAGGCTGAAGTCC |
| | AGATTGACCGCCTGATTACCGGCCGGCTGCAGTCTCTGCAA |
| | ACATACGTGACCCAGCAGCTGATCAGAGCAGCCGAGATCC |
| | GGGCATCCGCAAATCTGGCAGCAATCAAGATGAGCGAATG |
| | CGTGCTGGGCCAGTCCAAGCGGGTGGACTTTTGTGGCAAG |
| | GGCTACCACCTGATGAGCTTCCCCCAGAGCGCCCCACATGG |
| | CGTTGTTTTTCTGCACGTGACCTATGTCCCTGCTCAGGAAA |
| | AGAACTTTACAACTGCTCCTGCTATCTGCCATGACGGCAAG |
| | GCCCACTTCCCACGGGAGGGAGTGTTTGTGTCCAATGGCAC |
| | ACACTGGTTCGTGACCCAGAGGAACTTCTATGAACCCCAGA |
| | TCATCACCACTGACAATACCTTCGTGTCTGGAAATTGCGAC |
| | GTCGTGATCGGCATCGTTAACAACACCGTGTACGACCCTCT |
| | CCAGCCAGAGCTGGACTCCTTTAAGGAGGAACTGGATAAG |
| | TATTTTAAGAACCACACAAGCCCAGATGTGGATCTCGGGG |
| | ACATCTCCGGAATTAACGCCTCCTTCGTGAATATCCAGAAG |
| | GAGATTGACCGCCTAAATGAAGTTGCCAAGAACCTCAATG |
| | AGTCTCTGATTGATCTGCAGGAACTGGGCAAGTATGAGCA |
| | GTATATCAAATGGCCCTGGTACATTTGGCTGGGGTTTATCG |
| | CCGGACTGATTGCCATCGTCATGGTGACCATCATGCTGTGT |
| | TGCATGACCTCCTGTTGTTCCTGTCTGAAGGGCTGCTGTAG |
| | TTGCGGCTCTTGCTGTAAATTCGACGAAGATGATAGCGAGC |
| | CCGTGCTGAAGGGCGTGAAGCTGCATTATACCTGA |
| SARS-CoV-2 S protein | (SEQ ID NO: 169) |
| containing the L18F, | MFVFLVLLPLVSSQCVNFTNRTQLPSAYTNSFTRGVYYPDKV |
| T20N, P26S, D138Y, | FRSSVLHSTQDLFLPFFSNVTWFHAIHVSGTNGTKRFDNPVLP |
| R190S, K417T, E484K, | FNDGVYFASTEKSNIIRGWIFGTTLDSKTQSLLIVNNATNVVIK |
| N501Y, D614G, H655Y, | VCEFQFCNYPFLGVYYHKNNKSWMESEFRVYSSANNCTFEY |
| T10271 and V1176F | VSQPFLMDLEGKQGNFKNLSEFVFKNIDGYFKIYSKHTPINLV |
| mutations | RDLPQGFSALEPLVDLPIGINITRFQTLLALHRSYLTPGDSSSG |
| | WTAGAAAYYVGYLQPRTFLLKYNENGTITDAVDCALDPLSET |
| | KCTLKSFTVEKGIYQTSNFRVQPTESIVRFPNITNLCPFGEVFN |
| | ATRFASVYAWNRKRISNCVADYSVLYNSASFSTFKCYGVSPT |
| | KLNDLCFTNVYADSFVIRGDEVRQIAPGQTGTIADYNYKLPD |
| | DFTGCVIAWNSNNLDSKVGGNYNYLYRLFRKSNLKPFERDIS |
| | TEIYQAGSTPCNGVKGFNCYFPLQSYGFQPTYGVGYQPYRVV |
| | VLSFELLHAPATVCGPKKSTNLVKNKCVNFNFNGLTGTGVLT |
| | ESNKKFLPFQQFGRDIADTTDAVRDPQTLEILDITPCSFGGVSV |
| | ITPGTNTSNQVAVLYQGVNCTEVPVAIHADQLTPTWRVYSTG |
| | SNVFQTRAGCLIGAEYVNNSYECDIPIGAGICASYQTQTNSPRR |
| | ARSVASQSIIAYTMSLGAENSVAYSNNSIAIPTNFTISVTTEILP |
| | VSMTKTSVDCTMYICGDSTECSNLLLQYGSFCTQLNRALTGIA |
| | VEQDKNTQEVFAQVKQIYKTPPIKDFGGFNFSQILPDPSKPSKR |
| | SFIEDLLFNKVTLADAGFIKQYGDCLGDIAARDLICAQKFNGL |
| | TVLPPLLTDEMIAQYTSALLAGTITSGWTFGAGAALQIPFAMQ |
| | MAYRFNGIGVTQNVLYENQKLIANQFNSAIGKIQDSLSSTASA |
| | LGKLQDVVNQNAQALNTLVKQLSSNFGAISSVLNDILSRLDK |
| | VEAEVQIDRLITGRLQSLQTYVTQQLIRAAEIRASANLAAIKM |
| | SECVLGQSKRVDFCGKGYHLMSFPQSAPHGVVFLHVTYVPA |
| | QEKNFTTAPAICHDGKAHFPREGVFVSNGTHWFVTQRNFYEP |
| | QIITTDNTFVSGNCDVVIGIVNNTVYDPLQPELDSFKEELDKYF |
| | KNHTSPDVDLGDISGINASFVNIQKEIDRLNEVAKNLNESLIDL |
| | QELGKYEQYIKWPWYIWLGFIAGLIAIVMVTIMLCCMTSCCSC |
| | LKGCCSCGSCCKFDEDDSEPVLKGVKLHYT |
| Optimized nucleotide | (SEQ ID NO: 170) |
| sequence encoding a | ATGTTCGTCTTCCTCGTGCTGCTCCCACTCGTTTCTTCCCAG |
| SARS-CoV-2 S protein | TGTGTCAACTTTACAAACAGGACTCAGCTGCCATCCGCCT |
| mutated to remove a | ACACCAACTCCTTCACCAGAGGCGTGTATTACCCAGACAAG |
| furin cleavage site and | GTGTTTAGAAGCAGCGTGCTGCACTCTACCCAGGACCTCTT |
| to replace residues 986 | TCTGCCCTTTTTCAGCAACGTGACATGGTTTCACGCAATTC |
| and 987 with proline | ACGTGTCCGGCACTAATGGCACAAAGCGGTTCGACAATCC |
| and which contains the | AGTCCTGCCTTTCAACGATGGCGTCTACTTTGCATCTACTG |
| L18F, T20N, P26S, | AGAAATCCAATATCATTAGGGGATGGATCTTCGGCACAAC |
| D138Y, R190S, K417T, | CCTGGATTCTAAGACCCAGAGCCTGCTGATCGTCAACAACG |
| E484K, N501Y, D614G, | CCACAAACGTGGTCATTAAGGTTTGCGAGTTTCAGTTCTGT |
| H655Y, T1027I and | AACTACCCTTTTCTGGGCGTGTATTATCATAAGAACAATAA |
| V1176F mutations | GAGCTGGATGGAGTCCGAGTTTAGAGTGTATAGCTCTGCAA |
| | ATAATTGTACCTTTGAGTACGTGAGCCAGCCCTTTCTGATG |
| | GACCTGGAGGGAAAACAAGGAAACTTCAAAAACCTGAGC |
| | GAATTCGTTTTCAAAAACATCGACGGCTATTTCAAGATCTA |
| | TAGCAAGCATACCCCAATCAACCTCGTGAGGGACCTCCCCC |
| | AGGGCTTTAGCGCACTGGAGCCACTGGTTGACCTGCCTATC |
| | GGCATTAATATCACAAGATTTCAGACCCTGCTGGCACTGCA |
| | TAGAAGCTATCTGACCCCTGGAGACTCCTCTAGTGGGTGGA |
| | CTGCCGGCGCCGCTGCCTACTATGTGGGCTATCTGCAGCCA |
| | CGGACATTCCTGCTGAAATACAATGAGAACGGGACAATCA |
| | CAGATGCTGTTGATTGCGCACTCGACCCCCTGTCCGAGACA |
| | AAGTGCACTCTCAAGAGCTTTACCGTCGAGAAGGGCATCTA |
| | TCAGACCTCAAACTTCAGGGTGCAGCCCACAGAATCTATCG |
| | TGCGCTTCCCTAATATCACTAACCTGTGTCCTTTCGGTGAA |
| | GTGTTCAACGCCACCAGGTTTGCTAGCGTGTATGCCTGGAA |
| | CAGGAAGAGGATCTCTAACTGCGTCGCCGACTATTCCGTGC |
| | TGTATAACAGCGCCTCCTTCTCCACATTCAAATGCTATGGA |
| | GTGAGCCCGACAAAACTGAACGATCTCTGCTTTACAAATGT |
| | CTACGCCGACTCTTTTGTGATCAGAGGGGACGAGGTCCGGC |
| | AGATCGCACCAGGACAGACAGGCACCATTGCTGACTACAA |
| | CTATAAGCTGCCTGACGACTTCACAGGATGTGTGATCGCAT |
| | GGAACTCAAACAATCTGGACTCCAAAGTCGGGGGCAACTA |
| | TAATTACCTGTATCGCCTGTTCCGGAAGTCCAACCTGAAGC |
| | CCTTCGAGAGGGACATCAGTACAGAGATCTATCAGGCTGG |
| | CTCCACCCCTTGCAATGGCGTCAAGGGCTTTAATTGTTATT |
| | TTCCCCTGCAGTCTTACGGGTTTCAGCCTACTTACGGAGTT |
| | GGGTACCAGCCATACAGAGTGGTCGTGCTCAGCTTCGAGCT |
| | CCTGCATGCTCCAGCTACAGTTTGCGGGCCAAAGAAGTCCA |
| | CTAACCTGGTGAAGAATAAGTGCGTCAACTTCAACTTTAAC |
| | GGGCTCACCGGCACCGGCGTGCTGACTGAGAGCAACAAGA |
| | AGTTTCTGCCATTTCAACAGTTTGGACGGGACATTGCCGAC |
| | ACCACCGATGCCGTTCGGGATCCACAGACCCTGGAAATTCT |
| | GGACATTACACCGTGCAGCTTCGGGGGCGTGAGCGTGATC |
| | ACACCCGGAACCAATACAAGCAACCAGGTTGCCGTCCTGT |
| | ATCAGGGCGTCAATTGCACAGAAGTGCCAGTTGCTATCCA |
| | CGCAGACCAGCTGACTCCCACATGGCGGGTGTATAGCACC |
| | GGATCCAACGTGTTTCAGACCCGCGCCGGATGTCTCATTGG |
| | GGCCGAGTACGTGAATAACAGCTACGAGTGCGACATCCCC |
| | ATTGGCGCCGGCATTTGTGCGTCTTACCAGACTCAGACCAA |
| | CTCTCCTGGCTCCGCCTCTTCCGTTGCTAGTCAGTCTATTAT |
| | TGCCTATACCATGAGCCTCGGAGCTGAGAATAGCGTGGCCT |
| | ACTCCAATAATTCCATCGCAATCCCTACTAACTTCACTATTT |
| | CTGTGACCACCGAGATCCTGCCTGTGTCTATGACTAAGACT |
| | AGCGTTGATTGTACCATGTATATTTGTGGCGACTCTACCGA |
| | ATGTTCTAACCTGCTGCTTCAGTACGGCTCATTTTGCACAC |
| | AGCTGAACAGAGCCCTGACTGGGATCGCTGTGGAGCAGGA |
| | CAAGAACACACAGGAGGTGTTTGCACAGGTGAAGCAGATC |
| | TATAAGACCCCTCCTATTAAGGATTTCGGCGGATTCAATTT |
| | CTCACAGATTCTGCCAGACCCCAGTAAGCCTTCCAAGAGGA |
| | GCTTCATCGAGGATCTCCTGTTTAACAAGGTGACCCTGGCA |
| | GACGCCGGCTTTATTAAGCAATATGGGGATTGCCTGGGCGA |
| | CATTGCTGCCAGAGACCTGATTTGCGCCCAGAAATTCAATG |
| | GCCTCACAGTGCTGCCACCTCTGCTGACCGACGAGATGATC |
| | GCTCAATACACTAGCGCACTGCTGGCCGGAACCATCACATC |
| | AGGCTGGACCTTCGGGGCCGGAGCAGCACTGCAGATTCCA |
| | TTCGCCATGCAGATGGCCTATAGATTCAACGGCATTGGCGT |
| | CACACAGAACGTGCTGTACGAAAACCAGAAGCTCATCGCT |
| | AACCAGTTTAATTCCGCAATTGGAAAGATCCAAGATTCACT |
| | CAGCTCAACCGCCTCTGCACTCGGAAAGCTGCAGGACGTG |
| | GTCAACCAGAATGCTCAGGCCCTGAACACACTCGTCAAGC |
| | AGCTGTCCTCTAACTTTGGCGCTATCAGCTCCGTTCTGAAC |
| | GACATTCTGAGCCGCCTGGATCCCCCAGAGGCTGAAGTCCA |
| | GATTGACCGCCTGATTACCGGCCGGCTGCAGTCTCTGCAAA |
| | CATACGTGACCCAGCAGCTGATCAGAGCAGCCGAGATCCG |
| | GGCATCCGCAAATCTGGCAGCAATCAAGATGAGCGAATGC |
| | GTGCTGGGCCAGTCCAAGCGGGTGGACTTTTGTGGCAAGG |
| | GCTACCACCTGATGAGCTTCCCCCAGAGCGCCCCACATGGC |
| | GTTGTTTTTCTGCACGTGACCTATGTCCCTGCTCAGGAAAA |
| | GAACTTTACAACTGCTCCTGCTATCTGCCATGACGGCAAGG |
| | CCCACTTCCCACGGGAGGGAGTGTTTGTGTCCAATGGCACA |
| | CACTGGTTCGTGACCCAGAGGAACTTCTATGAACCCCAGAT |
| | CATCACCACTGACAATACCTTCGTGTCTGGAAATTGCGACG |
| | TCGTGATCGGCATCGTTAACAACACCGTGTACGACCCTCTC |
| | CAGCCAGAGCTGGACTCCTTTAAGGAGGAACTGGATAAGT |
| | ATTTTAAGAACCACACAAGCCCAGATGTGGATCTCGGGGA |
| | CATCTCCGGAATTAACGCCTCCTTCGTGAATATCCAGAAGG |
| | AGATTGACCGCCTAAATGAAGTTGCCAAGAACCTCAATGA |
| | GTCTCTGATTGATCTGCAGGAACTGGGCAAGTATGAGCAGT |
| | ATATCAAATGGCCCTGGTACATTTGGCTGGGGTTTATCGCC |
| | GGACTGATTGCCATCGTCATGGTGACCATCATGCTGTGTTG |
| | CATGACCTCCTGTTGTTCCTGTCTGAAGGGCTGCTGTAGTT |
| | GCGGCTCTTGCTGTAAATTCGACGAAGATGATAGCGAGCCC |
| | GTGCTGAAGGGCGTGAAGCTGCATTATACCTGA |
| SARS-CoV-2 S protein | (SEQ ID NO: 171) |
| containing mutated to | MFVFLVLLPLVSSQCVNFTNRTQLPSAYTNSFTRGVYYPDKV |
| remove a furin cleavage | FRSSVLHSTQDLFLPFFSNVTWFHAIHVSGTNGTKRFDNPVLP |
| site and to replace | FNDGVYFASTEKSNIIRGWIFGTTLDSKTQSLLIVNNATNVVIK |
| residues 986 and 987 | VCEFQFCNYPFLGVYYHKNNKSWMESEFRVYSSANNCTFEY |
| with proline and which | VSQPFLMDLEGKQGNFKNLSEFVFKNIDGYFKIYSKHTPINLV |
| contains the L18F, | RDLPQGFSALEPLVDLPIGINITRFQTLLALHRSYLTPGDSSSG |
| T20N, P26S, D138Y, | WTAGAAAYYVGYLQPRTFLLKYNENGTITDAVDCALDPLSET |
| R190S, K417T, E484K, | KCTLKSFTVEKGIYQTSNFRVQPTESIVRFPNITNLCPFGEVEN |
| N501Y, D614G, H655Y, | ATRFASVYAWNRKRISNCVADYSVLYNSASFSTFKCYGVSPT |
| T10271 and V1176F | KLNDLCFTNVYADSFVIRGDEVRQIAPGQTGTIADYNYKLPD |
| mutations | DFTGCVIAWNSNNLDSKVGGNYNYLYRLFRKSNLKPFERDIS |
| | TEIYQAGSTPCNGVKGFNCYFPLQSYGFQPTYGVGYQPYRVV |
| | VLSFELLHAPATVCGPKKSTNLVKNKCVNFNFNGLTGTGVLT |
| | ESNKKFLPFQQFGRDIADTTDAVRDPQTLEILDITPCSFGGVSV |
| | ITPGTNTSNQVAVLYQGVNCTEVPVAIHADQLTPTWRVYSTG |
| | SNVFQTRAGCLIGAEYVNNSYECDIPIGAGICASYQTQTNSPGS |
| | ASSVASQSIIAYTMSLGAENSVAYSNNSIAIPTNFTISVTTEILPV |
| | SMTKTSVDCTMYICGDSTECSNLLLQYGSFCTQLNRALTGIAV |
| | EQDKNTQEVFAQVKQIYKTPPIKDFGGFNFSQILPDPSKPSKRS |
| | FIEDLLFNKVTLADAGFIKQYGDCLGDIAARDLICAQKENGLT |
| | VLPPLLTDEMIAQYTSALLAGTITSGWTFGAGAALQIPFAMQ |
| | MAYRFNGIGVTQNVLYENQKLIANQFNSAIGKIQDSLSSTASA |
| | LGKLQDVVNQNAQALNTLVKQLSSNFGAISSVLNDILSRLDPP |
| | EAEVQIDRLITGRLQSLQTYVTQQLIRAAEIRASANLAAIKMSE |
| | CVLGQSKRVDFCGKGYHLMSFPQSAPHGVVFLHVTYVPAQE |
| | KNFTTAPAICHDGKAHFPREGVFVSNGTHWFVTQRNFYEPQII |
| | TTDNTFVSGNCDVVIGIVNNTVYDPLQPELDSFKEELDKYFKN |
| | HTSPDVDLGDISGINASFVNIQKEIDRLNEVAKNLNESLIDLQE |
| | LGKYEQYIKWPWYIWLGFIAGLIAIVMVTIMLCCMTSCCSCLK |
| | GCCSCGSCCKFDEDDSEPVLKGVKLHYT |

### Peptide Fusions

[0191] The inventors have identified regions in the SARS-COV-2 S protein which are likely to be highly antigenic. These include residues 815-833 (FP), 820-846 (D1) 1078-1111 (D2) and residues 815-846 (F1/D1). The sequences for these antigenic fragments in the full-length SARS-CoV-2 protein with the amino acid sequence of SEQ ID NO: 1 are SFIEDLLFNKVTLADAGF (SEQ ID NO: 21), LLFNKVTLADAGFIKQYGDCLGDIAA (SEQ ID NO: 22), PAICHDGKAHFPREGVFVSNGTHWFVTQRNFYE (SEQ ID NO: 23), and GGFNFSQILPDPSKPSKRSFIEDLLFNKVTLA (SEQ ID NO: 24), respectively. The antigenic regions can be arranged in different orders to form a variety of fusion peptides that are likely to be highly antigenic and therefore are expected to induce a strong immunogenic response. The domains can be linked by a linker sequence, e.g., GGGGS. Alternatively, given the similarity in their amino acid sequences, the FP and DI regions can be overlapped to produce a single immunogenic motif:

(SEQ ID NO: 99)
SFIEDLLFNKVTLADAGFIKQYGDCLGDIAA (FP/D1),

with the overlap sequence underlined.

[0192] An exemplary peptide fusion may have the following domains:
[0193] D1-linker-FP-linker-D2-linker-D1 (Fusion peptide A)
[0194] FP/D1-linker-FP/D1-linker-FP/D1 (Fusion peptide B)

[0195] Accordingly, the invention provides optimized nucleotide sequences that encode fusion peptides comprising antigenic regions of the SARS-COV-2 S protein. In one embodiment, an optimized nucleotide sequence encodes an amino acid sequence comprising Fusion peptide A. For example, the optimized nucleotide sequence can encode the amino acid sequence of SEQ ID NO: 25. In a particular embodiment, the optimized nucleotide sequence has the sequence of SEQ ID NO: 26. In another embodiment, the optimized nucleotide sequence encodes an amino acid sequence comprising Fusion peptide B. For example, the optimized nucleotide sequence can encode an amino acid sequence of SEQ ID NO: 27. In a particular embodiment, the optimized nucleotide sequence has the sequence of SEQ ID NO: 28.

[0196] In certain embodiments, the fusion peptide may be operably linked to an N terminal signal sequence, such as SEQ ID NO: 7. For example, an optimized nucleotide sequence may encode an amino acid sequence comprising Fusion peptide A operably linked with an N terminal signal sequence. The optimized nucleotide sequence can encode the amino acid sequence of SEQ ID NO: 51. In a particular embodiment, the optimized nucleotide sequence has the sequence of SEQ ID NO: 52. Alternatively, the optimized nucleotide sequence may encode an amino acid sequence comprising Fusion peptide B operably linked with an N terminal signal sequence. The optimized nucleotide sequence can encode the amino acid sequence of SEQ ID NO: 53. In a particular embodiment, the optimized nucleotide sequence has the sequence of SEQ ID NO: 54.

[0197] Additionally, the fusion peptides can be operably linked with a C-terminal Fc domain, typically in addition to an N terminal signal sequence. For example, an optimized nucleotide sequence may encode an amino acid sequence comprising Fusion peptide A operably linked with a C terminal Fc domain (e.g., SEQ ID NO: 18) and an N terminal signal sequence (e.g., SEQ ID NO: 7). The optimized nucleotide sequence can encode the amino acid sequence of SEQ ID NO: 55. In a particular embodiment, the optimized nucleotide sequence has the sequence of SEQ ID NO: 56. Alternatively, the optimized nucleotide sequence may encode an amino acid sequence comprising Fusion peptide B operably linked with a C terminal Fc domain (e.g., SEQ ID NO: 18) and an N terminal signal sequence (e.g., SEQ ID NO: 7). The optimized nucleotide sequence can encode the amino acid sequence of SEQ ID NO: 57. In a particular embodiment, the optimized nucleotide sequence has the sequence of SEQ ID NO: 58.

[0198] In some embodiments, the fusion peptides can be operably linked with a C terminal Fc domain which has been altered to improve circulation half-life of the resulting fusion protein. In particular embodiment, the Fc domain with improve circulation half-life has the amino acid sequence of SEQ ID NO: 100, SEQ ID NO: 101, SEQ ID NO: 102 or SEQ ID NO: 103. Accordingly, the invention also provides an optimized nucleotide sequence that encodes Fusion peptide A or Fusion peptide B, operably linked with an N-terminal signal peptide and a C-terminal Fc domain having the amino acid sequence of SEQ ID NO: 100, SEQ ID NO: 101, SEQ ID NO: 102 or SEQ ID NO: 103. The signal peptide can have the amino acid sequence of SEQ ID NO:7.

### Exemplary Optimized Nucleotide Sequences Encoding a Fusion Peptide

[0199] An optimized nucleotide sequence according to the present invention may encode one or more antigenic regions of a SARS-COV-2 S protein in the form of a fusion peptide. In one embodiment, the invention provides a nucleic acid comprising an optimized nucleotide sequence encoding one or more antigenic regions of the SARS-COV-2 S protein in the form of a fusion peptide. In some embodiments, the nucleic acid is an mRNA comprising an optimized nucleotide sequence encoding one or more antigenic regions of the SARS-COV-2 S protein in the form of a fusion peptide. In some embodiments, a suitable mRNA sequence comprises a nucleotide sequence encoding one or more antigenic regions of the SARS-COV-2 S protein in the form of a fusion peptide optimized for efficient expression in human cells. Exemplary optimized nucleotide sequences encoding antigenic regions of the SARS-COV-2 S protein in the form of a fusion peptide produced with the process for generating optimized nucleotide sequences in accordance with the invention and the corresponding amino acid sequence are shown in Table 2. Bold residues indicate those amino acids which have been mutated compared to a naturally occurring SARS-COV-2 S protein, underlined residues represent a signal peptide and the residues in italics indicate the presence of an Fc region.

TABLE 2
Exemplary fusion peptides.

| | |
|---|---|
| Optimized nucleotide | (SEQ ID NO: 25) |
| sequence encoding Fusion | ATGCTGCTGTTTAACAAAGTGACTCTGGCAGACGCAG |
| peptide A | GCTTTATCAAGCAGTACGGAGACTGTCTCGGGGACAT |
| | TGCAGCCGGCGGCGGAGGCTCATCTTTCATTGAGGAC |
| | CTGCTGTTCAACAAGGTCACTCTGGCAGATGCCGGAT |
| | TCGGAGGAGGGGGATCTCCAGCTATCTGCCATGACGG |
| | AAAGGCTCATTTTCCTCGGGAGGGTGTGTTTGTGTCCA |
| | ACGGAACCCATTGGTTCGTCACACAGCGCAACTTCTA |
| | TGAAGGAGGGGGGGGCTCCAGCTTCATCGAGGACCTG |
| | CTCTTTAACAAAGTGACCCTGGCCGATGCTGGATTTG |
| | GGGGAGGGGGATCCCTGCTGTTCAACAAAGTTACACT |
| | GGCCGACGCAGGCTTCATCAAACAGTACGGCGATTGT |
| | TTAGGGGACATCGCCGCTGGCGGCGGAGGATCACCTA |
| | AGTCCTGCGACAAAACCCATACATGTCCACCATGCCC |
| | AGCTCCTGAACTGCTCGGCGGGCCTAGTGTTTTCCTCT |
| | TCCCTCCTAAGCCCAAGGATACCCTCATGATCTCTCGC |
| | ACACCAGAAGTGACCTGCGTGGTCGTGGATGTCTCTC |
| | ACGAGGATCCTGAAGTGAAGTTTAACTGGTATGTCGA |
| | CGGAGTGGAAGTGCACAACGCCAAGACAAAGCCAAG |
| | AGAAGAACAATACAATTCTACTTATAGGGTGGTGTCT |
| | GTGCTGACAGTGCTGCACCAGGATTGGCTGAATGGAA |
| | AAGAATATAAGTGTAAGGTCTCTAACAAGGCCCTGCC |
| | CGCTCCAATTGAGAAGACAATTTCCAAGGCCAAGGGG |
| | CAGCCTCGGGAACCTCAGGTGTACACACTGCCCCCAT |
| | CCAGGGATGAACTGACTAAAAATCAGGTGTCTCTGAC |
| | ATGCCTGGTGAAAGGGTTTTATCCAAGTGACATTGCT |
| | GTGGAGTGGGAGTCTAATGGGCAGCCTGAAAATAACT |
| | ACAAGACCACACCACCAGTGCTCGATAGCGACGGGTC |
| | TTTCTTTCTGTATTCTAAACTGACCGTGGATAAATCTC |
| | GGTGGCAGCAGGGAAACGTGTTTTCTTGCTCAGTGAT |
| | GCACGAAGCTCTGCACAATCACTATACACAGAAATCC |
| | CTGTCCCTGTCTCCAGGCAAATAA |
| Fusion peptide A | (SEQ ID NO: 26) |
| | MLLFNKVTLADAGFIKQYGDCLGDIAAGGGGSSFIEDLL |
| | FNKVTLADAGFGGGGSPAICHDGKAHFPREGVFVSNGT |
| | HWFVTQRNFYEGGGGSSFIEDLLFNKVTLADAGFGGGG |
| | SLLFNKVTLADAGFIKQYGDCLGDIAA |
| Optimized nucleotide | (SEQ ID NO: 27) |
| sequence encoding Fusion | ATGTCCTTCATTGAGGACCTGCTGTTTAATAAGGTGAC |
| peptide B | CCTGGCCGACGCTGGGTTCATCAAACAGTATGGAGAT |
| | TGTCTGGGAGATATTGCAGCAGGCGGGGGCGGCAGC |
| | AGCTTTATTGAGGACCTCCTGTTCAACAAGGTGACCC |
| | TTGCCGACGCAGGGTTTATTAAGCAGTATGGCGACTG |
| | TCTGGGAGACATTGCAGCCGGCGGCGGCGGGTCTTCT |
| | TTTATCGAGGACCTGCTGTTCAACAAGGTGACACTGG |
| | CCGACGCAGGCTTTATTAAGCAGTACGGGGACTGCCT |
| | GGGAGACATTGCCGCCTGA |
| Fusion peptide B | (SEQ ID NO: 28) |
| | MSFIEDLLFNKVTLADAGFIKQYGDCLGDIAAGGGGSSFI |
| | EDLLFNKVTLADAGFIKQYGDCLGDIAAGGGGSSFIEDL |
| | LFNKVTLADAGFIKQYGDCLGDIAA |
| Optimized nucleotide | (SEQ ID NO: 52) |
| sequence encoding Fusion | ATGTTCGTGTTCCTGGTGCTGCTGCCACTGGTTTCCTC |
| peptide A with a signal | CCAGTGTCTGCTGTTTAACAAGGTTACACTGGCAGAC |
| peptide | GCCGGCTTCATCAAGCAGTATGGGGACTGTCTGGGCG |
| | ATATCGCCGCTGGCGGCGGAGGATCTAGCTTCATTGA |
| | GGACCTGCTGTTCAACAAAGTGACTCTGGCTGACGCC |
| | GGATTTGGCGGAGGAGGGTCTCCTGCCATTTGTCATG |
| | ACGGGAAGGCTCATTTCCCTAGGGAGGGGGTTTTTGT |
| | CTCCAATGGAACTCACTGGTTCGTGACCCAAAGAAAC |
| | TTCTATGAGGGAGGTGGCGGATCCTCTTTTATCGAGG |
| | ACCTGCTGTTTAACAAGGTCACTCTGGCCGATGCAGG |
| | CTTCGGAGGAGGAGGGTCTCTGCTGTTCAACAAAGTT |
| | ACTCTGGCAGATGCTGGGTTCATTAAGCAGTACGGCG |
| | ACTGTCTGGGCGATATTGCCGCCTGA |
| Fusion peptide A with a | (SEQ ID NO: 51) |
| signal peptide | MFVFLVLLPLVSSQCLLFNKVTLADAGFIKQYGDCLGDI |
| | AAGGGGSSFIEDLLFNKVTLADAGFGGGGSPAICHDGKA |
| | HFPREGVFVSNGTHWFVTQRNFYEGGGGSSFIEDLLENK |
| | VTLADAGFGGGGSLLFNKVTLADAGFIKQYGDCLGDIA |
| | A |
| Optimized nucleotide | (SEQ ID NO: 54) |
| sequence encoding Fusion | ATGTTCGTGTTCCTGGTCCTGCTACCCCTGGTGTCCTC |
| peptide B with a signal | TCAGTGCTCCTTCATTGAGGACCTGCTGTTTAATAAGG |
| peptide | TGACCCTGGCCGACGCTGGGTTCATCAAACAGTATGG |
| | AGATTGTCTGGGAGATATTGCAGCAGGCGGGGGCGGC |
| | AGCAGCTTTATTGAGGACCTCCTGTTCAACAAGGTGA |
| | CCCTTGCCGACGCAGGGTTTATTAAGCAGTATGGCGA |
| | CTGTCTGGGAGACATTGCAGCCGGCGGCGGCGGGTCT |
| | TCTTTTATCGAGGACCTGCTGTTCAACAAGGTGACACT |
| | GGCCGACGCAGGCTTTATTAAGCAGTACGGGGACTGC |
| | CTGGGAGACATTGCCGCCTGA |
| Fusion peptide B with a | (SEQ ID NO: 53) |
| signal peptide | MFVFLVLLPLVSSQCSFIEDLLFNKVTLADAGFIKQYGD |
| | CLGDIAAGGGGSSFIEDLLFNKVTLADAGFIKQYGDCLG |
| | DIAAGGGGSSFIEDLLFNKVTLADAGFIKQYGDCLGDIA |
| | A |
| Optimized nucleotide | (SEQ ID NO: 56) |
| sequence encoding Fusion | ATGTTTGTGTTCCTCGTTCTGCTGCCTCTGGTGAGCTC |
| peptide A with a signal | CCAGTGTCTGCTGTTTAACAAAGTGACTCTGGCAGAC |
| peptide and an Fc region | GCAGGCTTTATCAAGCAGTACGGAGACTGTCTCGGGG |
| | ACATTGCAGCCGGCGGCGGAGGCTCATCTTTCATTGA |
| | GGACCTGCTGTTCAACAAGGTCACTCTGGCAGATGCC |
| | GGATTCGGAGGAGGGGGATCTCCAGCTATCTGCCATG |
| | ACGGAAAGGCTCATTTTCCTCGGGAGGGTGTGTTTGT |
| | GTCCAACGGAACCCATTGGTTCGTCACACAGCGCAAC |
| | TTCTATGAAGGAGGGGGGGGCTCCAGCTTCATCGAGG |
| | ACCTGCTCTTTAACAAAGTGACCCTGGCCGATGCTGG |
| | ATTTGGGGGAGGGGGATCCCTGCTGTTCAACAAAGTT |
| | ACACTGGCCGACGCAGGCTTCATCAAACAGTACGGCG |
| | ATTGTTTAGGGGACATCGCCGCTGGCGGCGGAGGATC |
| | ACCTAAGTCCTGCGACAAAACCCATACATGTCCACCA |
| | TGCCCAGCTCCTGAACTGCTCGGCGGGCCTAGTGTTTT |
| | CCTCTTCCCTCCTAAGCCCAAGGATACCCTCATGATCT |
| | CTCGCACACCAGAAGTGACCTGCGTGGTCGTGGATGT |
| | CTCTCACGAGGATCCTGAAGTGAAGTTTAACTGGTAT |
| | GTCGACGGAGTGGAAGTGCACAACGCCAAGACAAAG |
| | CCAAGAGAAGAACAATACAATTCTACTTATAGGGTGG |
| | TGTCTGTGCTGACAGTGCTGCACCAGGATTGGCTGAA |
| | TGGAAAAGAATATAAGTGTAAGGTCTCTAACAAGGCC |
| | CTGCCCGCTCCAATTGAGAAGACAATTTCCAAGGCCA |
| | AGGGGCAGCCTCGGGAACCTCAGGTGTACACACTGCC |
| | CCCATCCAGGGATGAACTGACTAAAAATCAGGTGTCT |
| | CTGACATGCCTGGTGAAAGGGTTTTATCCAAGTGACA |
| | TTGCTGTGGAGTGGGAGTCTAATGGGCAGCCTGAAAA |
| | TAACTACAAGACCACACCACCAGTGCTCGATAGCGAC |
| | GGGTCTTTCTTTCTGTATTCTAAACTGACCGTGGATAA |
| | ATCTCGGTGGCAGCAGGGAAACGTGTTTTCTTGCTCA |
| | GTGATGCACGAAGCTCTGCACAATCACTATACACAGA |
| | AATCCCTGTCCCTGTCTCCAGGCAAATAA |
| Fusion peptide A with a | (SEQ ID NO: 55) |
| signal peptide and an Fc | MFVFLVLLPLVSSQCLLFNKVTLADAGFIKQYGDCLGDI |
| region | AAGGGGSSFIEDLLFNKVTLADAGFGGGGSPAICHDGKA |
| | HFPREGVFVSNGTHWFVTQRNFYEGGGGSSFIEDLLENK |
| | VTLADAGFGGGGSLLFNKVTLADAGFIKQYGDCLGDIA |
| | AGGGGSPKSCDKTHTCPPCPAPELLGGPSVFLFPPKPKDT |
| | LMISRTPEVTCVVVDVSHEDPEVKFNWYVDGVEVHNAKTK |
| | PREEQYNSTYRVVSVLTVLHQDWLNGKEYKCKVSNKALPAP |
| | IEKTISKAKGQPREPQVYTLPPSRDELTKNQVSLTCLVKGFY |
| | PSDIAVEWESNGQPENNYKTTPPVLDSDGSFFLYSKLTVDKS |
| | RWQQGNVFSCSVMHEALHNHYTQKSLSLSPGK |
| Optimized nucleotide | (SEQ ID NO: 58) |
| sequence encoding Fusion | ATGTTCGTGTTCCTGGTCCTGCTGCCTCTGGTGTCCTC |
| peptide B with a signal | TCAGTGCAGCTTCATCGAGGACCTGCTCTTTAACAAG |
| peptide and an Fc region | GTGACTCTCGCAGATGCTGGCTTCATCAAGCAGTACG |
| | GAGACTGCCTTGGAGACATCGCTGCAGGCGGAGGGG |
| | GCAGCAGTTTCATCGAGGACCTGCTGTTTAACAAGGT |
| | GACCCTGGCCGACGCCGGGTTCATTAAGCAATACGGC |
| | GATTGTCTGGGAGACATCGCAGCTGGGGGAGGGGGG |
| | AGCTCTTTTATTGAGGACCTGCTGTTCAACAAGGTGA |
| | CTCTGGCCGACGCAGGGTTCATCAAACAGTATGGGGA |
| | CTGTCTGGGAGATATCGCAGCCGGGGGAGGAGGCTCC |
| | CCTAAGTCCTGCGACAAAACCCATACATGTCCACCAT |
| | GCCCAGCTCCTGAACTGCTCGGCGGGCCTAGTGTTTTC |
| | CTCTTCCCTCCTAAGCCCAAGGATACCCTCATGATCTC |
| | TCGCACACCAGAAGTGACCTGCGTGGTCGTGGATGTC |
| | TCTCACGAGGATCCTGAAGTGAAGTTTAACTGGTATG |
| | TCGACGGAGTGGAAGTGCACAACGCCAAGACAAAGC |
| | CAAGAGAAGAACAATACAATTCTACTTATAGGGTGGT |
| | GTCTGTGCTGACAGTGCTGCACCAGGATTGGCTGAAT |
| | GGAAAAGAATATAAGTGTAAGGTCTCTAACAAGGCCC |
| | TGCCCGCTCCAATTGAGAAGACAATTTCCAAGGCCAA |
| | GGGGCAGCCTCGGGAACCTCAGGTGTACACACTGCCC |
| | CCATCCAGGGATGAACTGACTAAAAATCAGGTGTCTC |
| | TGACATGCCTGGTGAAAGGGTTTTATCCAAGTGACAT |
| | TGCTGTGGAGTGGGAGTCTAATGGGCAGCCTGAAAAT |
| | AACTACAAGACCACACCACCAGTGCTCGATAGCGACG |
| | GGTCTTTCTTTCTGTATTCTAAACTGACCGTGGATAAA |
| | TCTCGGTGGCAGCAGGGAAACGTGTTTTCTTGCTCAG |
| | TGATGCACGAAGCTCTGCACAATCACTATACACAGAA |
| | ATCCCTGTCCCTGTCTCCAGGCAAATAA |
| Fusion peptide B with a | (SEQ ID NO: 57) |
| signal peptide and an Fc | MFVFLVLLPLVSSQCSFIEDLLFNKVTLADAGFIKQYGD |
| region | CLGDIAAGGGGSSFIEDLLFNKVTLADAGFIKQYGDCLG |
| | DIAAGGGGSSFIEDLLFNKVTLADAGFIKQYGDCLGDIA |
| | AGGGGSPKSCDKTHTCPPCPAPELLGGPSVFLFPPKPKDT |
| | LMISRTPEVTCVVVDVSHEDPEVKFNWYVDGVEVHNAKTK |
| | PREEQYNSTYRVVSVLTVLHQDWLNGKEYKCKVSNKALPAP |
| | IEKTISKAKGQPREPQVYTLPPSRDELTKNQVSLTCLVKGFY |
| | PSDIAVEWESNGQPENNYKTTPPVLDSDGSFFLYSKLTVDKS |
| | RWQQGNVFSCSVMHEALHNHYTQKSLSLSPGK |

### Other Essential Structural Proteins

[0200] Based on their homology to proteins in related β-coronaviruses, the M, N and E proteins of SARS-COV-2 are considered to play important roles in forming the structure of the virus particle. The M protein is believed to be the most abundant structural protein in the virion. It is 222 amino acids in length with 3 transmembrane domains. It has been proposed that the M protein gives the virus particle its shape. The M protein is suggested to exist as a dimer in the virion where it may adopt two different conformations allowing it to promote membrane curvature and bind to the nucleocapsid.

[0201] The 419 amino acid long N protein likely forms the nucleocapsid. It is composed of two separate domains, which are both capable of binding RNA in vitro using different mechanisms. The N protein binds the viral genome in a beads-on-a-string type conformation and can also bind to nsp3, a key component of the viral replicase complex, and the M protein.

[0202] The E protein is 77 amino acids in length and is believed to be present only in small quantities within the virus particle. One of the E protein's proposed functions is to facilitate the assembly and release of the virus. The amino acid sequence for the M, N and E proteins of SARS-CoV-2 are shown in Table 3 below.

[0203] While memory CD8+ T cells have broad reactivity against many SARS-COV-2 proteins, including ORF1ab, S, N, M, and ORF3a, most of the epitopes are located in ORF1ab and the highest density of epitopes is located in the N protein (Ferretti et al. (2020) https://doi.org/10.1101/2020.07.24.20161653). ORF1ab is encoded by residues 266 . . . 13555 of the NC 045512.2 SARS-COV-2 genome. The ORF1ab and N proteins of SARS-COV-2 may therefore be useful for inducing a T cell response.

TABLE 3
SARS-CoV-2 M, E and N proteins

| | |
|---|---|
| Nucleotide sequence of | (SEQ ID NO: 59) |
| SARS-CoV-2 M protein | ATGGCAGACAACGGTACTATTACCGTTGAGGAGCTTA |
| NC_004718.3 SARS-CoV-2 | AACAACTCCTGGAACAATGGAACCTAGTAATAGGTTT |
| genome | CCTATTCCTAGCCTGGATTATGTTACTACAATTTGCCT |
| Range 26398..27063 | ATTCTAATCGGAACAGGTTTTTGTACATAATAAAGCTT |
| | GTTTTCCTCTGGCTCTTGTGGCCAGTAACACTTGCTTG |
| | TTTTGTGCTTGCTGCTGTCTACAGAATTAATTGGGTGA |
| | CTGGCGGGATTGCGATTGCAATGGCTTGTATTGTAGG |
| | CTTGATGTGGCTTAGCTACTTCGTTGCTTCCTTCAGGC |
| | TGTTTGCTCGTACCCGCTCAATGTGGTCATTCAACCCA |
| | GAAACAAACATTCTTCTCAATGTGCCTCTCCGGGGGA |
| | CAATTGTGACCAGACCGCTCATGGAAAGTGAACTTGT |
| | CATTGGTGCTGTGATCATTCGTGGTCACTTGCGAATGG |
| | CCGGACACTCCCTAGGGCGCTGTGACATTAAGGACCT |
| | GCCAAAAGAGATCACTGTGGCTACATCACGAACGCTT |
| | TCTTATTACAAATTAGGAGCGTCGCAGCGTGTAGGCA |
| | CTGATTCAGGTTTTGCTGCATACAACCGCTACCGTATT |
| | GGAAACTATAAATTAAATACAGACCACGCCGGTAGCA |
| | ACGACAATATTGCTTTGCTAGTACAGTAA |
| SARS-CoV-2 M protein | (SEQ ID NO: 60) |
| sequence | MADSNGTITVEELKKLLEQWNLVIGFLFLTWICLLQFAY |
| Accession number | ANRNRFLYIIKLIFLWLLWPVTLACFVLAAVYRINWITG |
| QII57163 | GIAIAMACLVGLMWLSYFIASFRLFARTRSMWSFNPETN |
| | ILLNVPLHGTILTRPLLESELVIGAVILRGHLRIAGHHLGR |
| | CDIKDLPKEITVATSRTLSYYKLGASQRVAGDSGFAAYS |
| | RYRIGNYKLNTDHSSSSDNIALLVQ |
| Nucleotide sequence of | (SEQ ID NO: 61) |
| SARS-CoV-2 E protein | ATGTACTCATTCGTTTCGGAAGAAACAGGTACGTTAA |
| NC_004718.3 SARS-CoV-2 | TAGTTAATAGCGTACTTCTTTTTCTTGCTTTCGTGGTAT |
| genome | TCTTGCTAGTCACACTAGCCATCCTTACTGCGCTTCGA |
| Range 26117..26347 | TTGTGTGCGTACTGCTGCAATATTGTTAACGTGAGTTT |
| | AGTAAAACCAACGGTTTACGTCTACTCGCGTGTTAAA |
| | AATCTGAACTCTTCTGAAGGAGTTCCTGATCTTCTGGT |
| | CTAA |
| SARS-CoV-2 E protein | (SEQ ID NO: 62) |
| sequence | MYSFVSEETGTLIVNSVLLFLAFVVFLLVTLAILTALRLC |
| Accession number P59637.1 | AYCCNIVNVSLVKPSFYVYSRVKNLNSSRVPDLLV |
| Nucleotide sequence of | (SEQ ID NO: 63) |
| SARS-CoV-2 N protein | ATGTCTGATAATGGACCCCAAAATCAGCGAAATGCAC |
| NC_045512.2 SARS-CoV-2 | CCCGCATTACGTTTGGTGGACCCTCAGATTCAACTGG |
| genome | CAGTAACCAGAATGGAGAACGCAGTGGGGCGCGATC |
| range 28274..29533 | AAAACAACGTCGGCCCCAAGGTTTACCCAATAATACT |
| | GCGTCTTGGTTCACCGCTCTCACTCAACATGGCAAGG |
| | AAGACCTTAAATTCCCTCGAGGACAAGGCGTTCCAAT |
| | TAACACCAATAGCAGTCCAGATGACCAAATTGGCTAC |
| | TACCGAAGAGCTACCAGACGAATTCGTGGTGGTGACG |
| | GTAAAATGAAAGATCTCAGTCCAAGATGGTATTTCTA |
| | CTACCTAGGAACTGGGCCAGAAGCTGGACTTCCCTAT |
| | GGTGCTAACAAAGACGGCATCATATGGGTTGCAACTG |
| | AGGGAGCCTTGAATACACCAAAAGATCACATTGGCAC |
| | CCGCAATCCTGCTAACAATGCTGCAATCGTGCTACAA |
| | CTTCCTCAAGGAACAACATTGCCAAAAGGCTTCTACG |
| | CAGAAGGGAGCAGAGGCGGCAGTCAAGCCTCTTCTCG |
| | TTCCTCATCACGTAGTCGCAACAGTTCAAGAAATTCA |
| | ACTCCAGGCAGCAGTAGGGGAACTTCTCCTGCTAGAA |
| | TGGCTGGCAATGGCGGTGATGCTGCTCTTGCTTTGCTG |
| | CTGCTTGACAGATTGAACCAGCTTGAGAGCAAAATGT |
| | CTGGTAAAGGCCAACAACAACAAGGCCAAACTGTCA |
| | CTAAGAAATCTGCTGCTGAGGCTTCTAAGAAGCCTCG |
| | GCAAAAACGTACTGCCACTAAAGCATACAATGTAACA |
| | CAAGCTTTCGGCAGACGTGGTCCAGAACAAACCCAAG |
| | GAAATTTTGGGGACCAGGAACTAATCAGACAAGGAA |
| | CTGATTACAAACATTGGCCGCAAATTGCACAATTTGC |
| | CCCCAGCGCTTCAGCGTTCTTCGGAATGTCGCGCATTG |
| | GCATGGAAGTCACACCTTCGGGAACGTGGTTGACCTA |
| | CACAGGTGCCATCAAATTGGATGACAAAGATCCAAAT |
| | TTCAAAGATCAAGTCATTTTGCTGAATAAGCATATTG |
| | ACGCATACAAAACATTCCCACCAACAGAGCCTAAAAA |
| | GGACAAAAAGAAGAAGGCTGATGAAACTCAAGCCTT |
| | ACCGCAGAGACAGAAGAAACAGCAAACTGTGACTCT |
| | TCTTCCTGCTGCAGATTTGGATGATTTCTCCAAACAAT |
| | TGCAACAATCCATGAGCAGTGCTGACTCAACTCAGGC |
| | CTAA |
| SARS-CoV-2 N protein | (SEQ ID NO: 64) |
| sequence | MSDNGPQNQRNAPRITFGGPSDSTGSNQNGERSGARSK |
| Accession number | QRRPQGLPNNTASWFTALTQHGKEDLKFPRGQGVPINT |
| QIS29990.1 | NSSPDDQIGYYRRATRRIRGGDGKMKDLSPRWYFYYLG |
| | TGPEAGLPYGANKDGIIWVATEGALNTPKDHIGTRNPAN |
| | NAAIVLQLPQGTTLPKGFYAEGSRGGSQASSRSSSRSRNS |
| | SRNLTPGSSRGTSPARMAGNGGDAALALLLLDRLNQLE |
| | SKMSGKGQQQQGQTVTKKSAAEASKKPRQKRTATKAY |
| | NVTQAFGRRGPEQTQGNFGDQELIRQGTDYKHWPQIAQ |
| | FAPSASAFFGMSRIGMEVTPSGTWLTYTGAIKLDDKDPN |
| | FKDQVILLNKHIDAYKTFPPTEPKKDKKKKADETQALPQ |
| | RQKKQQTVTLLPAADLDDFSKQLQQSMSSADSTQA |

[0204] An optimized nucleotide sequence according to the present invention may encode a SARS-COV-2 E protein or an antigenic fragment thereof. In one embodiment, the invention provides a nucleic acid comprising an optimized nucleotide sequence encoding a SARS-COV-2 E protein or an antigenic fragment thereof. In some embodiments, the nucleic acid is an mRNA comprising an optimized nucleotide sequence encoding a SARS-COV-2 E protein or an antigenic fragment thereof. In some embodiments, a suitable mRNA sequence comprises a nucleotide sequence encoding a SARS-COV-2 small envelope protein or an antigenic fragment thereof optimized for efficient expression in human cells.

[0205] An optimized nucleotide sequence according to the present invention may encode a SARS-COV-2 M protein or an antigenic fragment thereof. In one embodiment, the invention provides a nucleic acid comprising an optimized nucleotide sequence encoding a SARS-COV-2 M protein or an antigenic fragment thereof. In some embodiments, the nucleic acid is an mRNA comprising an optimized nucleotide sequence encoding a SARS-COV-2 M protein or an antigenic fragment thereof. In some embodiments, a suitable mRNA sequence comprises a nucleotide sequence encoding a SARS-COV-2 M protein or an antigenic fragment thereof optimized for efficient expression in human cells. An optimized nucleotide sequence according to the present invention may encode a SARS-COV-2 N protein or an antigenic fragment thereof. In one embodiment, the invention provides a nucleic acid comprising an optimized nucleotide sequence encoding a SARS-COV-2 N protein or an antigenic fragment thereof. In some embodiments, the nucleic acid is an mRNA comprising an optimized nucleotide sequence encoding a SARS-COV-2 N protein or an antigenic fragment thereof. In some embodiments, a suitable mRNA sequence comprises a nucleotide sequence encoding a SARS-COV-2 N protein or an antigenic fragment thereof optimized for efficient expression in human cells.

[0206] An optimized nucleotide sequence according to the present invention may encode a SARS-COV-2 ORF1ab protein or an antigenic fragment thereof. In one embodiment, the invention provides a nucleic acid comprising an optimized nucleotide sequence encoding a SARS-COV-2 ORF1ab protein or an antigenic fragment thereof. In some embodiments, the nucleic acid is an mRNA comprising an optimized nucleotide sequence encoding a SARS-COV-2 ORF1ab protein or an antigenic fragment thereof. In some embodiments, a suitable mRNA sequence comprises a nucleotide sequence encoding a SARS-COV-2 ORF1ab protein or an antigenic fragment thereof optimized for efficient expression in human cells.

[0207] In some embodiments, a first nucleic acid comprising an optimized nucleotide sequence encoding a SARS-COV-2 S protein or an antigenic fragment thereof is combined with a second nucleic acid comprising an optimized nucleotide sequence encoding a SARS-COV-2 M protein or an antigenic fragment thereof. In some embodiments, a first nucleic acid comprising an optimized nucleotide sequence encoding a SARS-COV-2 S protein or an antigenic fragment thereof is combined with a second nucleic acid comprising an optimized nucleotide sequence encoding a SARS-COV-2 N protein or an antigenic fragment thereof. In some embodiments, a first nucleic acid comprising an optimized nucleotide sequence encoding a SARS-COV-2 S protein or an antigenic fragment thereof is combined with a second nucleic acid comprising an optimized nucleotide sequence encoding a SARS-COV-2 E protein or an antigenic fragment thereof. In other embodiments, a first nucleic acid comprising an optimized nucleotide sequence encoding a SARS-CoV-2 S protein or an antigenic fragment thereof is combined with second, third and/or fourth nucleic acids, wherein said second nucleic acid comprises an optimized nucleotide sequence encoding a SARS-COV-2 M protein or an antigenic fragment thereof, wherein said third nucleic acid comprises an optimized nucleotide sequence encoding a SARS-COV-2 N protein or an antigenic fragment thereof, and wherein said fourth nucleic acid comprises an optimized nucleotide sequence encoding a SARS-COV-2 E protein or an antigenic fragment thereof.

mRNA Sequences

[0208] In some embodiments, an mRNA comprising an optimized nucleotide sequence encoding a SARS-COV-2 S protein or an antigenic fragment thereof also contains 5′ and 3′ UTR sequences. Exemplary 5′ and 3′ UTR sequences are shown below:

### Exemplary 5′ UTR Sequence

(SEQ ID NO: 144)
GGACAGAUCGCCUGGAGACGCCAUCCACGCUGUUUUGACCUCCAUAGAA
GACACCGGGACCGAUCCAGCCUCCGCGGCCGGGAACGGUGCAUUGGAAC
GCGGAUUCCCCGUGCCAAGAGUGACUCACCGUCCUUGACACG

### Exemplary 3′ UTR Sequence

(SEQ ID NO: 145)
CGGGUGGCAUCCCUGUGACCCCUCCCCAGUGCCUCUCCUGGCCCUGGAA
GUUGCCACUCCAGUGCCCACCAGCCUUGUCCUAAUAAAAUUAAGUUGCA
UCAAGCU
OR
(SEQ ID NO: 146)
GGGUGGCAUCCCUGUGACCCCUCCCCAGUGCCUCUCCUGGCCCUGGAAG
UUGCCACUCCAGUGCCCACCAGCCUUGUCCUAAUAAAAUUAAGUUGCAU
CAAAGCU

Exemplary mRNA Constructs

[0211] In a particular embodiment, an mRNA comprising an optimized nucleotide sequence encoding a SARS-COV-2 S protein comprises the following structural elements:

TABLE 4
Structural elements of exemplary mRNA constructs

| | | |
|---|---|---|
| Structural | | Sequence |
| Element | Description | Coordinates |

mRNA construct 1

| | | |
|---|---|---|
| Cap Structure | [chemical structure] | 1 |
| 5′ UTR | GGAC . . . CACG | 1-140 |
| | | (SEQ ID NO: 144) |
| SARS-CoV- | AUG . . . UGA | 141-3962 |
| 2 S protein¹ | | (SEQ ID NO:148), |
| | | which corresponds |
| | | to the nucleotide |
| | | sequence of |
| | | SEQ ID NO: 44 |
| 3′ UTR | CGGG . . . AGCU | 3963-4067 |
| | | (SEQ ID NO: 145) |
| PolyA tail | (A)ₓ, x = 100-500³ | NA |

mRNA construct 2

| | | |
|---|---|---|
| Cap Structure | [chemical structure] | 1 |
| 5′ UTR | GGAC . . .CACG | 1-140 |
| | | (SEQ ID NO: 144) |
| SARS-CoV- | AUG .... UGA | 141-3962 |
| 2 S protein² | | (SEQ ID NO:173), |
| | | which corresponds |
| | | to the nucleotide |
| | | sequence of |
| | | SEQ ID NO: 166 |
| 3′ UTR | CGGG . . . AGCU | 3963-4067 |
| | | (SEQ ID NO: 145) |
| Poly A tail | (A)ₓ, x = 100-500³ | NA |

NA = not applicable
UTR = untranslated region
¹Optimized nucleotide sequence encoding a SARS-CoV-2 S protein mutated to remove a furin cleavage site and to replace residues 986 and 987 with proline
²Optimized nucleotide sequence encoding a SARS-CoV-2 S protein mutated to remove a furin cleavage site and to replace residues 986 and 987 with proline and further containing the L18F, D80A, D215G, L242-, A243-, L244-, K417N, E484K, N501Y, D614G and A701V mutations
³expected range

[0212] In one particular embodiment, the mRNA in accordance with the present invention has the following nucleic acid sequence:

| (SEQ ID NO: 147) | |
|---|---|
| 1 | GGACAGAUCG CCUGGAGACG CCAUCCACGC UGUUUUGACC UCCAUAGAAG |
| 51 | ACACCGGGAC CGAUCCAGCC UCCGCGGCCG GGAACGGUGC AUUGGAACGC |
| 101 | GGAUUCCCCG UGCCAAGAGU GACUCACCGU CCUUGACACG AUGUUCGUCU |
| 151 | UCCUCGUGCU GCUCCCACUC GUUUCUUCCC AGUGUGUCAA CCUGACAACU |
| 201 | AGGACUCAGC UGCCACCAGC CUACACCAAC UCCUUCACCA GAGGCGUGUA |
| 251 | UUACCCAGAC AAGGUGUUUA GAAGCAGCGU GCUGCACUCU ACCCAGGACC |
| 301 | UCUUUCUGCC CUUUUUCAGC AACGUGACAU GGUUUCACGC AAUUCACGUG |
| 351 | UCCGGCACUA AUGGCACAAA GCGGUUCGAC AAUCCAGUCC UGCCUUUCAA |
| 401 | CGAUGGCGUC UACUUUGCAU CUACUGAGAA AUCCAAUAUC AUUAGGGGAU |
| 451 | GGAUCUUCGG CACAACCCUG GAUUCUAAGA CCCAGAGCCU GCUGAUCGUC |
| 501 | AACAACGCCA CAAACGUGGU CAUUAAGGUU UGCGAGUUUC AGUUCUGUAA |
| 551 | CGAUCCUUUU CUGGGCGUGU AUUAUCAUAA GAACAAUAAG AGCUGGAUGG |
| 601 | AGUCCGAGUU UAGAGUGUAU AGCUCUGCAA AUAAUUGUAC CUUUGAGUAC |
| 651 | GUGAGCCAGC CCUUUCUGAU GGACCUGGAG GGAAAACAAG GAAACUUCAA |
| 701 | AAACCUGCGG GAAUUCGUUU UCAAAAACAU CGACGGCUAU UUCAAGAUCU |
| 751 | AUAGCAAGCA UACCCCAAUC AACCUCGUGA GGGACCUCCC CCAGGGCUUU |
| 801 | AGCGCACUGG AGCCACUGGU UGACCUGCCU AUCGGCAUUA AUAUCACAAG |
| 851 | AUUUCAGACC CUGCUGGCAC UGCAUAGAAG CUAUCUGACC CCUGGAGACU |
| 901 | CCUCUAGUGG GUGGACUGCC GGCGCCGCUG CCUACUAUGU GGGCUAUCUG |
| 951 | CAGCCACGGA CAUUCCUGCU GAAAUACAAU GAGAACGGGA CAAUCACAGA |
| 1001 | UGCUGUUGAU UGCGCACUCG ACCCCCUGUC CGAGACAAAG UGCACUCUCA |
| 1051 | AGAGCUUUAC CGUCGAGAAG GGCAUCUAUC AGACCUCAAA CUUCAGGGUG |
| 1101 | CAGCCCACAG AAUCUAUCGU GCGCUUCCCU AAUAUCACUA ACCUGUGUCC |
| 1151 | UUUCGGUGAA GUGUUCAACG CCACCAGGUU UGCUAGCGUG UAUGCCUGGA |
| 1201 | ACAGGAAGAG GAUCUCUAAC UGCGUCGCCG ACUAUUCCGU GCUGUAUAAC |
| 1251 | AGCGCCUCCU UCUCCACAUU CAAAUGCUAU GGAGUGAGCC CGACAAAACU |
| 1301 | GAACGAUCUC UGCUUUACAA AUGUCUACGC CGACUCUUUU GUGAUCAGAG |
| 1351 | GGGACGAGGU CCGGCAGAUC GCACCAGGAC AGACAGGCAA GAUUGCUGAC |
| 1401 | UACAACUAUA AGCUGCCUGA CGACUUCACA GGAUGUGUGA UCGCAUGGAA |
| 1451 | CUCAAACAAU CUGGACUCCA AAGUCGGGGG CAACUAUAAU UACCUGUAUC |
| 1501 | GCCUGUUCCG GAAGUCCAAC CUGAAGCCCU UCGAGAGGGA CAUCAGUACA |
| 1551 | GAGAUCUAUC AGGCUGGCUC CACCCCUUGC AAUGGCGUCG AAGGCUUUAA |
| 1601 | UUGUUAUUUU CCCCUGCAGU CUUACGGGUU UCAGCCUACU AAUGGAGUUG |
| 1651 | GGUACCAGCC AUACAGAGUG GUCGUGCUCA GCUUCGAGCU CCUGCAUGCU |
| 1701 | CCAGCUACAG UUUGCGGGCC AAAGAAGUCC ACUAACCUGG UGAAGAAUAA |
| 1751 | GUGCGUCAAC UUCAACUUUA ACGGGCUCAC CGGCACCGGC GUGCUGACUG |
| 1801 | AGAGCAACAA GAAGUUUCUG CCAUUUCAAC AGUUUGGACG GGACAUUGCC |
| 1851 | GACACCACCG AUGCCGUUCG GGAUCCACAG ACCCUGGAAA UUCUGGACAU |
| 1901 | UACACCGUGC AGCUUCGGGG GCGUGAGCGU GAUCACACCC GGAACCAAUA |
| 1951 | CAAGCAACCA GGUUGCCGUC CUGUAUCAGG AUGUCAAUUG CACAGAAGUG |
| 2001 | CCAGUUGCUA UCCACGCAGA CCAGCUGACU CCCACAUGGC GGGUGUAUAG |
| 2051 | CACCGGAUCC AACGUGUUUC AGACCCGCGC CGGAUGUCUC AUUGGGGCCG |
| 2101 | AGCACGUGAA UAACAGCUAC GAGUGCGACA UCCCCAUUGG CGCCGGCAUU |
| 2151 | UGUGCGUCUU ACCAGACUCA GACCAACUCU CCUGGCUCCG CCUCUUCCGU |
| 2201 | UGCUAGUCAG UCUAUUAUUG CCUAUACCAU GAGCCUCGGA GCUGAGAAUA |
| 2251 | GCGUGGCCUA CUCCAAUAAU UCCAUCGCAA UCCCUACUAA CUUCACUAUU |
| 2301 | UCUGUGACCA CCGAGAUCCU GCCUGUGUCU AUGACUAAGA CUAGCGUUGA |
| 2351 | UUGUACCAUG UAUAUUUGUG GCGACUCUAC CGAAUGUUCU AACCUGCUGC |
| 2401 | UUCAGUACGG CUCAUUUUGC ACACAGCUGA ACAGAGCCCU GACUGGGAUC |
| 2451 | GCUGUGGAGC AGGACAAGAA CACACAGGAG GUGUUUGCAC AGGUGAAGCA |
| 2501 | GAUCUAUAAG ACCCCUCCUA UUAAGGAUUU CGGCGGAUUC AAUUUCUCAC |
| 2551 | AGAUUCUGCC AGACCCCAGU AAGCCUUCCA AGAGGAGCUU CAUCGAGGAU |
| 2601 | CUCCUGUUUA ACAAGGUGAC CCUGGCAGAC GCCGGCUUUA UUAAGCAAUA |
| 2651 | UGGGGAUUGC CUGGGCGACA UUGCUGCCAG AGACCUGAUU UGCGCCCAGA |
| 2701 | AAUUCAAUGG CCUCACAGUG CUGCCACCUC UGCUGACCGA CGAGAUGAUC |
| 2751 | GCUCAAUACA CUAGCGCACU GCUGGCCGGA ACCAUCACAU CAGGCUGGAC |
| 2801 | CUUCGGGGCC GGAGCAGCAC UGCAGAUUCC AUUCGCCAUG CAGAUGGCCU |
| 2851 | AUAGAUUCAA CGGCAUUGGC GUCACACAGA ACGUGCUGUA CGAAAACCAG |
| 2901 | AAGCUCAUCG CUAACCAGUU UAAUUCCGCA AUUGGAAAGA UCCAAGAUUC |
| 2951 | ACUCAGCUCA ACCGCCUCUG CACUCGGAAA GCUGCAGGAC GUGGUCAACC |
| 3001 | AGAAUGCUCA GGCCCUGAAC ACACUCGUCA AGCAGCUGUC CUCUAACUUU |
| 3051 | GGCGCUAUCA GCUCCGUUCU GAACGACAUU CUGAGCCGCC UGGAUCCCCC |
| 3101 | AGAGGCUGAA GUCCAGAUUG ACCGCCUGAU UACCGGCCGG CUGCAGUCUC |
| 3151 | UGCAAACAUA CGUGACCCAG CAGCUGAUCA GAGCAGCCGA GAUCCGGGCA |
| 3201 | UCCGCAAAUC UGGCAGCAAC UAAGAUGAGC GAAUGCGUGC UGGGCCAGUC |
| 3251 | CAAGCGGGUG GACUUUUGUG GCAAGGGCUA CCACCUGAUG AGCUUCCCCC |
| 3301 | AGAGCGCCCC ACAUGGCGUU GUUUUUCUGC ACGUGACCUA UGUCCCUGCU |
| 3351 | CAGGAAAAGA ACUUUACAAC UGCUCCUGCU AUCUGCCAUG ACGGCAAGGC |
| 3401 | CCACUUCCCA CGGGAGGGAG UGUUUGUGUC CAAUGGCACA CACUGGUUCG |
| 3451 | UGACCCAGAG GAACUUCUAU GAACCCCAGA UCAUCACCAC UGACAAUACC |
| 3501 | UUCGUGUCUG GAAAUUGCGA CGUCGUGAUC GGCAUCGUUA ACAACACCGU |
| 3551 | GUACGACCCU CUCCAGCCAG AGCUGGACUC CUUUAAGGAG GAACUGGAUA |
| 3601 | AGUAUUUUAA GAACCACACA AGCCCAGAUG UGGAUCUCGG GGACAUCUCC |
| 3651 | GGAAUUAACG CCUCCGUGGU GAAUAUCCAG AAGGAGAUUG ACCGCCUAAA |
| 3701 | UGAAGUUGCC AAGAACCUCA AUGAGUCUCU GAUUGAUCUG CAGGAACUGG |
| 3751 | GCAAGUAUGA GCAGUAUAUC AAAUGGCCCU GGUACAUUUG GCUGGGGUUU |
| 3801 | AUCGCCGGAC UGAUUGCCAU CGUCAUGGUG ACCAUCAUGC UGUGUUGCAU |
| 3851 | GACCUCCUGU UGUUCCUGUC UGAAGGGCUG CUGUAGUUGC GGCUCUUGCU |
| 3901 | GUAAAUUCGA CGAAGAUGAU AGCGAGCCCG UGCUGAAGGG CGUGAAGCUG |
| 3951 | CAUUAUACCU GACGGGUGGC AUCCCUGUGA CCCCUCCCCA GUGCCUCUCC |
| 4001 | UGGCCCUGGA AGUUGCCACU CCAGUGCCCA CCAGCCUUGU CCUAAUAAAA |
| 4051 | UUAAGUUGCA UCAAGCU |

### +Poly A Tail

Nucleic acids in bold denote start and stop codons

[0213] In another particular embodiment, the mRNA in accordance with the present invention has the following nucleic acid sequence:

| (SEQ ID NO: 172) | |
|---|---|
| 1 | GGACAGAUCG CCUGGAGACG CCAUCCACGC UGUUUUGACC UCCAUAGAAG |
| 51 | ACACCGGGAC CGAUCCAGCC UCCGCGGCCG GGAACGGUGC AUUGGAACGC |
| 101 | GGAUUCCCCG UGCCAAGAGU GACUCACCGU CCUUGACACG AUGUUCGUCU |
| 151 | UCCUCGUGCU GCUCCCACUC GUUUCUUCCC AGUGUGUCAA CUUCACAACU |
| 201 | AGGACUCAGC UGCCACCAGC CUACACCAAC UCCUUCACCA GAGGCGUGUA |
| 251 | UUACCCAGAC AAGGUGUUUA GAAGCAGCGU GCUGCACUCU ACCCAGGACC |
| 301 | UCUUUCUGCC CUUUUUCAGC AACGUGACAU GGUUUCACGC AAUUCACGUG |
| 351 | UCCGGCACUA AUGGCACAAA GCGGUUCGCC AAUCCAGUCC UGCCUUUCAA |
| 401 | CGAUGGCGUC UACUUUGCAU CUACUGAGAA AUCCAAUAUC AUUAGGGGAU |
| 451 | GGAUCUUCGG CACAACCCUG GAUUCUAAGA CCCAGAGCCU GCUGAUCGUC |
| 501 | AACAACGCCA CAAACGUGGU CAUUAAGGUU UGCGAGUUUC AGUUCUGUAA |
| 551 | CGAUCCUUUU CUGGGCGUGU AUUAUCAUAA GAACAAUAAG AGCUGGAUGG |
| 601 | AGUCCGAGUU UAGAGUGUAU AGCUCUGCAA AUAAUUGUAC CUUUGAGUAC |
| 651 | GUGAGCCAGC CCUUUCUGAU GGACCUGGAG GGAAAACAAG GAAACUUCAA |
| 701 | AAACCUGCGG GAAUUCGUUU UCAAAAACAU CGACGGCUAU UUCAAGAUCU |
| 751 | AUAGCAAGCA UACCCCAAUC AACCUCGUGA GGGGCCUCCC CCAGGGCUUU |
| 801 | AGCGCACUGG AGCCACUGGU UGACCUGCCU AUCGGCAUUA AUAUCACAAG |
| 851 | AUUUCAGACC CUGCAUAGAA GCUAUCUGAC CCCUGGAGAC UCCUCUAGUG |
| 901 | GGUGGACUGC CGGCGCCGCU GCCUACUAUG UGGGCUAUCU GCAGCCACGG |
| 951 | ACAUUCCUGC UGAAAUACAA UGAGAACGGG ACAAUCACAG AUGCUGUUGA |
| 1001 | UUGCGCACUC GACCCCCUGU CCGAGACAAA GUGCACUCUC AAGAGCUUUA |
| 1051 | CCGUCGAGAA GGGCAUCUAU CAGACCUCAA ACUUCAGGGU GCAGCCCACA |
| 1101 | GAAUCUAUCG UGCGCUUCCC UAAUAUCACU AACCUGUGUC CUUUCGGUGA |
| 1151 | AGUGUUCAAC GCCACCAGGU UUGCUAGCGU GUAUGCCUGG AACAGGAAGA |
| 1201 | GGAUCUCUAA CUGCGUCGCC GACUAUUCCG UGCUGUAUAA CAGCGCCUCC |
| 1251 | UUCUCCACAU UCAAAUGCUA UGGAGUGAGC CCGACAAAAC UGAACGAUCU |
| 1301 | CUGCUUUACA AAUGUCUACG CCGACUCUUU UGUGAUCAGA GGGGACGAGG |
| 1351 | UCCGGCAGAU CGCACCAGGA CAGACAGGCA ACAUUGCUGA CUACAACUAU |
| 1401 | AAGCUGCCUG ACGACUUCAC AGGAUGUGUG AUCGCAUGGA ACUCAAACAA |
| 1451 | UCUGGACUCC AAAGUCGGGG GCAACUAUAA UUACCUGUAU CGCCUGUUCC |
| 1501 | GGAAGUCCAA CCUGAAGCCC UUCGAGAGGG ACAUCAGUAC AGAGAUCUAU |
| 1551 | CAGGCUGGCU CCACCCCUUG CAAUGGCGUC AAGGGCUUUA AUUGUUAUUU |
| 1601 | UCCCCUGCAG UCUUACGGGU UUCAGCCUAC UUACGGAGUU GGGUACCAGC |
| 1651 | CAUACAGAGU GGUCGUGCUC AGCUUCGAGC UCCUGCAUGC UCCAGCUACA |
| 1701 | GUUUGCGGGC CAAAGAAGUC CACUAACCUG GUGAAGAAUA AGUGCGUCAA |
| 1751 | CUUCAACUUU AACGGGCUCA CCGGCACCGG CGUGCUGACU GAGAGCAACA |
| 1801 | AGAAGUUUCU GCCAUUUCAA CAGUUUGGAC GGGACAUUGC CGACACCACC |
| 1851 | GAUGCCGUUC GGGAUCCACA GACCCUGGAA AUUCUGGACA UUACACCGUG |
| 1901 | CAGCUUCGGG GGCGUGAGCG UGAUCACACC CGGAACCAAU ACAAGCAACC |
| 1951 | AGGUUGCCGU CCUGUAUCAG GGCGUCAAUU GCACAGAAGU GCCAGUUGCU |
| 2001 | AUCCACGCAG ACCAGCUGAC UCCCACAUGG CGGGUGUAUA GCACCGGAUC |
| 2051 | CAACGUGUUU CAGACCCGCG CCGGAUGUCU CAUUGGGGCC GAGCACGUGA |
| 2101 | AUAACAGCUA CGAGUGCGAC AUCCCCAUUG GCGCCGGCAU UUGUGCGUCU |
| 2151 | UACCAGACUC AGACCAACUC UCCUGGCUCC GCCUCUUCCG UUGCUAGUCA |
| 2201 | GUCUAUUAUU GCCUAUACCA UGAGCCUCGG AGUGGAGAAU AGCGUGGCCU |
| 2251 | ACUCCAAUAA UUCCAUCGCA AUCCCUACUA ACUUCACUAU UUCUGUGACC |
| 2301 | ACCGAGAUCC UGCCUGUGUC UAUGACUAAG ACUAGCGUUG AUUGUACCAU |
| 2351 | GUAUAUUUGU GGCGACUCUA CCGAAUGUUC UAACCUGCUG CUUCAGUACG |
| 2401 | GCUCAUUUUG CACACAGCUG AACAGAGCCC UGACUGGGAU CGCUGUGGAG |
| 2451 | CAGGACAAGA ACACACAGGA GGUGUUUGCA CAGGUGAAGC AGAUCUAUAA |
| 2501 | GACCCCUCCU AUUAAGGAUU UCGGCGGAUU CAAUUUCUCA CAGAUUCUGC |
| 2551 | CAGACCCCAG UAAGCCUUCC AAGAGGAGCU UCAUCGAGGA UCUCCUGUUU |
| 2601 | AACAAGGUGA CCCUGGCAGA CGCCGGCUUU AUUAAGCAAU AUGGGGAUUG |
| 2651 | CCUGGGCGAC AUUGCUGCCA GAGACCUGAU UUGCGCCCAG AAAUUCAAUG |
| 2701 | GCCUCACAGU GCUGCCACCU CUGCUGACCG ACGAGAUGAU CGCUCAAUAC |
| 2751 | ACUAGCGCAC UGCUGGCCGG AACCAUCACA UCAGGCUGGA CCUUCGGGGC |
| 2801 | CGGAGCAGCA CUGCAGAUUC CAUUCGCCAU GCAGAUGGCC UAUAGAUUCA |
| 2851 | ACGGCAUUGG CGUCACACAG AACGUGCUGU ACGAAAACCA GAAGCUCAUC |
| 2901 | GCUAACCAGU UUAAUUCCGC AAUUGGAAAG AUCCAAGAUU CACUCAGCUC |
| 2951 | AACCGCCUCU GCACUCGGAA AGCUGCAGGA CGUGGUCAAC CAGAAUGCUC |
| 3001 | AGGCCCUGAA CACACUCGUC AAGCAGCUGU CCUCUAACUU UGGCGCUAUC |
| 3051 | AGCUCCGUUC UGAACGACAU UCUGAGCCGC CUGGAUCCCC CAGAGGCUGA |
| 3101 | AGUCCAGAUU GACCGCCUGA UUACCGGCCG GCUGCAGUCU CUGCAAACAU |
| 3151 | ACGUGACCCA GCAGCUGAUC AGAGCAGCCG AGAUCCGGGC AUCCGCAAAU |
| 3201 | CUGGCAGCAA CUAAGAUGAG CGAAUGCGUG CUGGGCCAGU CCAAGCGGGU |
| 3251 | GGACUUUUGU GGCAAGGGCU ACCACCUGAU GAGCUUCCCC CAGAGCGCCC |
| 3301 | CACAUGGCGU UGUUUUUCUG CACGUGACCU AUGUCCCUGC UCAGGAAAAG |
| 3351 | AACUUUACAA CUGCUCCUGC UAUCUGCCAU GACGGCAAGG CCCACUUCCC |
| 3401 | ACGGGAGGGA GUGUUUGUGU CCAAUGGCAC ACACUGGUUC GUGACCCAGA |
| 3451 | GGAACUUCUA UGAACCCCAG AUCAUCACCA CUGACAAUAC CUUCGUGUCU |
| 3501 | GGAAAUUGCG ACGUCGUGAU CGGCAUCGUU AACAACACCG UGUACGACCC |
| 3551 | UCUCCAGCCA GAGCUGGACU CCUUUAAGGA GGAACUGGAU AAGUAUUUUA |
| 3601 | AGAACCACAC AAGCCCAGAU GUGGAUCUCG GGGACAUCUC CGGAAUUAAC |
| 3651 | GCCUCCGUGG UGAAUAUCCA GAAGGAGAUU GACCGCCUAA AUGAAGUUGC |
| 3701 | CAAGAACCUC AAUGAGUCUC UGAUUGAUCU GCAGGAACUG GGCAAGUAUG |
| 3751 | AGCAGUAUAU CAAAUGGCCC UGGUACAUUU GGCUGGGGUU UAUCGCCGGA |
| 3801 | CUGAUUGCCA UCGUCAUGGU GACCAUCAUG CUGUGUUGCA UGACCUCCUG |
| 3851 | UUGUUCCUGU CUGAAGGGCU GCUGUAGUUG CGGCUCUUGC UGUAAAUUCG |
| 3901 | ACGAAGAUGA UAGCGAGCCC GUGCUGAAGG GCGUGAAGCU GCAUUAUACC |
| 3951 | UGACGGGUGG CAUCCCUGUG ACCCCUCCCC AGUGCCUCUC CUGGCCCUGG |
| 4001 | AAGUUGCCAC UCCAGUGCCC ACCAGCCUUG UCCUAAUAAA AUUAAGUUGC |
| 4051 | AUCAAGCU |

### +Poly A Tail

Nucleic acids in bold denote start and stop codons
mRNA Synthesis

### In Vitro Transcription

[0214] mRNAs according to the present invention may be synthesized according to any of a variety of known methods. Various methods are described in published U.S. Application No. US 2018/0258423, and can be used to practice the present invention, all of which are incorporated herein by reference. For example, mRNAs according to the present invention may be synthesized via in vitro transcription (IVT). Briefly, IVT is typically performed with a linear or circular DNA template containing a promoter, a pool of ribonucleotide triphosphates, a buffer system that may include DTT and magnesium ions, and an appropriate RNA polymerase (e.g., T3, T7, or SP6 RNA polymerase), DNAse I, pyrophosphatase, and/or RNAse inhibitor. The exact conditions will vary according to the specific application.

[0215] In some embodiments, for the preparation of mRNA according to the invention, a DNA template is transcribed in vitro. A suitable DNA template typically has a promoter, for example a T3, T7 or SP6 promoter, for in vitro transcription, followed by desired nucleotide sequence for desired mRNA and a termination signal.

### Nucleotides

[0216] In some embodiments, an mRNA comprises or consists of naturally-occurring nucleosides (or unmodified nucleosides; i.e., adenosine, guanosine, cytidine, and uridine). In some embodiments an mRNA comprises one or more modified nucleosides, such as nucleoside analogs (e.g. adenosine analog, guanosine analog, cytidine analog, or uridine analog). The presence of one or more nucleoside analogs may render an mRNA more stable and/or less immunogenic than a control mRNA with the same sequence but containing only naturally-occurring nucleosides. In a particular embodiment of the invention, mRNAs comprising an optimized nucleotide sequence encoding a SARS-COV-2 antigen are synthesized with naturally-occurring nucleosides. Without wishing to be bound by any particular theory, the inventors believe that the use of mRNAs prepared with naturally-occurring nucleosides is advantageous for providing an immunogenic composition of the invention.

[0217] In some embodiments, an mRNA comprises both unmodified and modified nucleosides. In some embodiments, the one or more modified nucleosides is a nucleoside analog. In some embodiments, the one or more modified nucleosides comprises at least one modification selected from a modified sugar, and a modified nucleobase. In some embodiments, the mRNA comprises one or more modified internucleoside linkages.

[0218] In some embodiments, the one or more modified nucleosides is a nucleoside analog, for example one of 2-aminoadenosine, 2-thiothymidine, inosine, pyrrolo-pyrimidine, 3-methyl adenosine, 5-methylcytidine, C-5 propynyl-cytidine, C-5 propynyl-uridine, 2-aminoadenosine, C5-bromouridine, C5-fluorouridine, C5-iodouridine, C5-propynyl-uridine, C5-propynyl-cytidine, C5-methylcytidine, 2-aminoadenosine, 7-deazaadenosine, 7-deazaguanosine, 8-oxoadenosine, 8-oxoguanosine, O(6)-methylguanine, pseudouridine (e.g., N-1-methyl-pseudouridine), 2-thiouridine, and 2-thiocytidine. See, e.g., U.S. Pat. No. 8,278,036 or WO 2011/012316 for a discussion of 5-methyl-cytidine, pseudouridine, and 2-thio-uridine and their incorporation into mRNA. In some embodiments, the mRNA may be RNA wherein 25% of U residues are 2-thio-uridine and 25% of C residues are 5-methylcytidine. Teachings for the use of such modified RNA are disclosed in US Patent Publication US 2012/0195936 and international publication WO 2011/012316, both of which are hereby incorporated by reference in their entirety.

### Post-Synthesis Processing

[0219] Typically, a 5′ cap and/or a 3′ tail may be added after mRNA synthesis. The presence of the cap is important in providing resistance to nucleases found in most eukaryotic cells. The presence of a “tail” serves to protect the mRNA from exonuclease degradation. Alternatively, the 5′ cap and/or a 3′ tail sequences are included in the DNA template sequences used in in vitro transcription reaction.

[0220] A 5′ cap is typically added as follows: first, an RNA terminal phosphatase removes one of the terminal phosphate groups from the 5′ nucleotide, leaving two terminal phosphates; guanosine triphosphate (GTP) is then added to the terminal phosphates via a guanylyl transferase, producing a 5′5′5 triphosphate linkage; and the 7-nitrogen of guanine is then methylated by a methyltransferase. Examples of cap structures include, but are not limited to, m7G(5′)ppp (5′(A,G(5′)ppp(5′)A and G(5′)ppp(5′)G. Additional cap structures are described in published U.S. Application No. US 2016/0032356 and published U.S. Application No. US 2018/0125989, which are incorporated herein by reference.

[0221] Typically, a tail structure includes a poly(A) and/or poly(C) tail. A poly-A or poly-C tail on the 3′ terminus of mRNA typically includes at least 50 adenosine or cytosine nucleotides, at least 150 adenosine or cytosine nucleotides, at least 200 adenosine or cytosine nucleotides, at least 250 adenosine or cytosine nucleotides, at least 300 adenosine or cytosine nucleotides, at least 350 adenosine or cytosine nucleotides, at least 400 adenosine or cytosine nucleotides, at least 450 adenosine or cytosine nucleotides, at least 500 adenosine or cytosine nucleotides, at least 550 adenosine or cytosine nucleotides, at least 600 adenosine or cytosine nucleotides, at least 650 adenosine or cytosine nucleotides, at least 700 adenosine or cytosine nucleotides, at least 750 adenosine or cytosine nucleotides, at least 800 adenosine or cytosine nucleotides, at least 850 adenosine or cytosine nucleotides, at least 900 adenosine or cytosine nucleotides, at least 950 adenosine or cytosine nucleotides, or at least 1 kb adenosine or cytosine nucleotides, respectively. In some embodiments, a poly A or poly C tail may be about 10 to 800 adenosine or cytosine nucleotides (e.g., about 10 to 200 adenosine or cytosine nucleotides, about 10 to 300 adenosine or cytosine nucleotides, about 10 to 400 adenosine or cytosine nucleotides, about 10 to 500 adenosine or cytosine nucleotides, about 10 to 550 adenosine or cytosine nucleotides, about 10 to 600 adenosine or cytosine nucleotides, about 50 to 600 adenosine or cytosine nucleotides, about 100 to 600 adenosine or cytosine nucleotides, about 150 to 600 adenosine or cytosine nucleotides, about 200 to 600 adenosine or cytosine nucleotides, about 250 to 600 adenosine or cytosine nucleotides, about 300 to 600 adenosine or cytosine nucleotides, about 350 to 600 adenosine or cytosine nucleotides, about 400 to 600 adenosine or cytosine nucleotides, about 450 to 600 adenosine or cytosine nucleotides, about 500 to 600 adenosine or cytosine nucleotides, about 10 to 150 adenosine or cytosine nucleotides, about 10 to 100 adenosine or cytosine nucleotides, about 20 to 70 adenosine or cytosine nucleotides, or about 20 to 60 adenosine or cytosine nucleotides) respectively. In some embodiments, a tail structure includes is a combination of poly (A) and poly (C) tails with various lengths described herein. In some embodiments, a tail structure includes at least 50%, 55%, 65%, 70%, 75%, 80%, 85%, 90%, 92%, 94%, 95%, 96%, 97%, 98%, or 99% adenosine nucleotides. In some embodiments, a tail structure includes at least 50%, 55%, 65%, 70%, 75%, 80%, 85%, 90%, 92%, 94%, 95%, 96%, 97%, 98%, or 99% cytosine nucleotides.

### Post-Synthesis Purification

[0222] Various methods may be used to purify mRNA after synthesis. In some embodiments, the mRNA is purified using Tangential Flow Filtration. Suitable purification methods include those described in published U.S. Application No. US 2016/0040154, published U.S. Application No. US 2015/0376220, published U.S. Application No. US 2018/0251755, published U.S. Application No. US 2018/0251754, U.S. Provisional Application No. 62/757,612 filed on Nov. 8, 2018, and U.S. Provisional Application No. 62/891,781 filed on Aug. 26, 2019, all of which are incorporated by reference herein and may be used to practice the present invention.

[0223] In some embodiments, the mRNA is purified before capping and tailing. In some embodiments, the mRNA is purified after capping and tailing. In some embodiments, the mRNA is purified both before and after capping and tailing.

[0224] In some embodiments, the mRNA is purified either before or after or both before and after capping and tailing, by centrifugation.

[0225] In some embodiments, the mRNA is purified either before or after or both before and after capping and tailing, by filtration.

[0226] In some embodiments, the mRNA is purified either before or after or both before and after capping and tailing, by Tangential Flow Filtration (TFF).

### Lipid Nanoparticles

[0227] According to the present invention, an mRNA comprising an optimized nucleotide sequence of the invention may be delivered in a lipid nanoparticle. Typically, a lipid nanoparticle suitable for use with the present invention comprises one or more cationic lipids. In some embodiments, a lipid nanoparticle comprises one or more cationic lipids, one or more non-cationic lipids, one or more cholesterol-based lipids and one or more PEG-modified lipids. In some embodiments, a lipid nanoparticle comprises one or more cationic lipids, one or more non-cationic lipids, and one or more PEG-modified lipids. In some embodiments, a lipid nanoparticle comprises no more than four distinct lipid components.

[0228] A typical lipid nanoparticle for use with the invention is composed of four lipid components: a cationic lipid (e.g., a sterol-based cationic lipid), a non-cationic lipid (e.g., DOPE or DEPE), a cholesterol-based lipid (e.g., cholesterol) and a PEG-modified lipid (e.g., DMG-PEG2K). In some embodiments, a lipid nanoparticle comprises no more than three distinct lipid components. An exemplary lipid nanoparticle is composed of three lipid components: a cationic lipid (e.g., a sterol-based cationic lipid), a non-cationic lipid (e.g., DOPE or DEPE) and a PEG-modified lipid (e.g., DMG-PEG2K).

Formation of Lipid Nanoparticles Encapsulating mRNA

[0229] The lipid nanoparticles for use in the invention can be prepared by various techniques which are presently known in the art. For example, multilamellar vesicles (MLV) may be prepared according to conventional techniques, such as by depositing a selected lipid on the inside wall of a suitable container or vessel by dissolving the lipid in an appropriate solvent, and then evaporating the solvent to leave a thin film on the inside of the vessel or by spray drying. An aqueous phase may then be added to the vessel with a vortexing motion which results in the formation of MLVs. Unilamellar vesicles (ULV) can then be formed by homogenization, sonication or extrusion of the multilamellar vesicles. In addition, unilamellar vesicles can be formed by detergent removal techniques.

[0230] Various methods are described in published U.S. Application No. US 2011/0244026, published U.S. Application No. US 2016/0038432, published U.S. Application No. US 2018/0153822, published U.S. Application No. US 2018/0125989 and U.S. Provisional Application No. 62/877,597, filed Jul. 23, 2019 and can be used to practice the present invention, all of which are incorporated herein by reference. As used herein, Process A refers to a conventional method of encapsulating mRNA by mixing it with a mixture of lipids, without first pre-forming the lipids into lipid nanoparticles, as described in US 2016/0038432. As used herein, Process B refers to a process of encapsulating mRNA by mixing pre-formed lipid nanoparticles with mRNA, as described in US 2018/0153822.

[0231] Briefly, the process of preparing mRNA-loaded lipid nanoparticles includes a step of heating one or more of the solutions (i.e., applying heat from a heat source to the solution) to a temperature (or to maintain at a temperature) greater than ambient temperature, the one or more solutions being the solution comprising the pre-formed lipid nanoparticles, the solution comprising the mRNA and the mixed solution comprising the lipid nanoparticle encapsulated mRNA. In some embodiments, the process includes the step of heating one or both of the mRNA solution and the pre-formed lipid nanoparticle solution, prior to the mixing step. In some embodiments, the process includes heating one or more of the solution comprising the pre-formed lipid nanoparticles, the solution comprising the mRNA and the solution comprising the lipid nanoparticle encapsulated mRNA, during the mixing step. In some embodiments, the process includes the step of heating the lipid nanoparticle encapsulated mRNA, after the mixing step. In some embodiments, the temperature to which one or more of the solutions is heated (or at which one or more of the solutions is maintained) is or is greater than about 30° C., 37° C., 40° C., 45° C., 50° C., 55° C., 60° C., 65° C., or 70° C. In some embodiments, the temperature to which one or more of the solutions is heated ranges from about 25-70° C., about 30-70° C., about 35-70° C., about 40-70° C., about 45-70° C., about 50-70° C., or about 60-70° C. In some embodiments, the temperature greater than ambient temperature to which one or more of the solutions is heated is about 65° C.

[0232] Various methods may be used to prepare an mRNA solution suitable for the present invention. In some embodiments, mRNA may be directly dissolved in a buffer solution described herein. In some embodiments, an mRNA solution may be generated by mixing an mRNA stock solution with a buffer solution prior to mixing with a lipid solution for encapsulation. In some embodiments, an mRNA solution may be generated by mixing an mRNA stock solution with a buffer solution immediately before mixing with a lipid solution for encapsulation. In some embodiments, a suitable mRNA stock solution may contain mRNA in water at a concentration at or greater than about 0.2 mg/ml, 0.4 mg/ml, 0.5 mg/ml, 0.6 mg/ml, 0.8 mg/ml, 1.0 mg/ml, 1.2 mg/ml, 1.4 mg/ml, 1.5 mg/ml, or 1.6 mg/ml, 2.0 mg/ml, 2.5 mg/ml, 3.0 mg/ml, 3.5 mg/ml, 4.0 mg/ml, 4.5 mg/ml, or 5.0 mg/ml.

[0233] In some embodiments, an mRNA stock solution is mixed with a buffer solution using a pump. Exemplary pumps include but are not limited to gear pumps, peristaltic pumps and centrifugal pumps.

[0234] Typically, the buffer solution is mixed at a rate greater than that of the mRNA stock solution. For example, the buffer solution may be mixed at a rate at least 1×, 2×, 3×, 4×, 5×, 6×, 7×, 8×, 9×, 10×, 15×, or 20× greater than the rate of the mRNA stock solution. In some embodiments, a buffer solution is mixed at a flow rate ranging between about 100-6000 ml/minute (e.g., about 100-300 ml/minute, 300-600 ml/minute, 600-1200 ml/minute, 1200-2400 ml/minute, 2400-3600 ml/minute, 3600-4800 ml/minute, 4800-6000 ml/minute, or 60-420 ml/minute). In some embodiments, a buffer solution is mixed at a flow rate of or greater than about 60 ml/minute, 100 ml/minute, 140 ml/minute, 180 ml/minute, 220 ml/minute, 260 ml/minute, 300 ml/minute, 340 ml/minute, 380 ml/minute, 420 ml/minute, 480 ml/minute, 540 ml/minute, 600 ml/minute, 1200 ml/minute, 2400 ml/minute, 3600 ml/minute, 4800 ml/minute, or 6000 ml/minute.

[0235] In some embodiments, an mRNA stock solution is mixed at a flow rate ranging between about 10-600 ml/minute (e.g., about 5-50 ml/minute, about 10-30 ml/minute, about 30-60 ml/minute, about 60-120 ml/minute, about 120-240 ml/minute, about 240-360 ml/minute, about 360-480 ml/minute, or about 480-600 ml/minute). In some embodiments, an mRNA stock solution is mixed at a flow rate of or greater than about 5 ml/minute, 10 ml/minute, 15 ml/minute, 20 ml/minute, 25 ml/minute, 30 ml/minute, 35 ml/minute, 40 ml/minute, 45 ml/minute, 50 ml/minute, 60 ml/minute, 80 ml/minute, 100 ml/minute, 200 ml/minute, 300 ml/minute, 400 ml/minute, 500 ml/minute, or 600 ml/minute.

[0236] According to the present invention, a lipid solution contains a mixture of lipids suitable to form lipid nanoparticles for encapsulation of mRNA. In some embodiments, a suitable lipid solution is ethanol based. For example, a suitable lipid solution may contain a mixture of desired lipids dissolved in pure ethanol (i.e., 100% ethanol). In another embodiment, a suitable lipid solution is isopropyl alcohol based. In another embodiment, a suitable lipid solution is dimethylsulfoxide-based. In another embodiment, a suitable lipid solution is a mixture of suitable solvents including, but not limited to, ethanol, isopropyl alcohol and dimethylsulfoxide.

[0237] A suitable lipid solution may contain a mixture of desired lipids at various concentrations. For example, a suitable lipid solution may contain a mixture of desired lipids at a total concentration of or greater than about 0.1 mg/ml, 0.5 mg/ml, 1.0 mg/ml, 2.0 mg/ml, 3.0 mg/ml, 4.0 mg/ml, 5.0 mg/ml, 6.0 mg/ml, 7.0 mg/ml, 8.0 mg/ml, 9.0 mg/ml, 10 mg/ml, 15 mg/ml, 20 mg/ml, 30 mg/ml, 40 mg/ml, 50 mg/ml, or 100 mg/ml. In some embodiments, a suitable lipid solution may contain a mixture of desired lipids at a total concentration ranging from about 0.1-100 mg/ml, 0.5-90 mg/ml, 1.0-80 mg/ml, 1.0-70 mg/ml, 1.0-60 mg/ml, 1.0-50 mg/ml, 1.0-40 mg/ml, 1.0-30 mg/ml, 1.0-20 mg/ml, 1.0-15 mg/ml, 1.0-10 mg/ml, 1.0-9 mg/ml, 1.0-8 mg/ml, 1.0-7 mg/ml, 1.0-6 mg/ml, or 1.0-5 mg/ml. In some embodiments, a suitable lipid solution may contain a mixture of desired lipids at a total concentration up to about 100 mg/ml, 90 mg/ml, 80 mg/ml, 70 mg/ml, 60 mg/ml, 50 mg/ml, 40 mg/ml, 30 mg/ml, 20 mg/ml, or 10 mg/ml.

[0238] Any desired lipids may be mixed at any ratios suitable for encapsulating mRNA. In some embodiments, a suitable lipid solution contains a mixture of desired lipids including cationic lipids, non-cationic lipids, cholesterol-based lipids, amphiphilic block copolymers (e.g. poloxamers) and/or PEG-modified lipids. In some embodiments, a suitable lipid solution contains a mixture of desired lipids including one or more cationic lipids, one or more non-cationic lipids, one or more cholesterol-based lipids, and/or one or more PEG-modified lipids.

[0239] In some embodiments, provided pharmaceutical compositions comprise a lipid nanoparticle wherein the mRNA are associated on both the surface of the lipid nanoparticle and encapsulated within the same lipid nanoparticle. For example, during preparation of the pharmaceutical compositions of the present invention, cationic lipid nanoparticles may associate with the mRNA through electrostatic interactions.

[0240] In some embodiments, the compounds, pharmaceutical compositions and methods of the invention comprise mRNA encapsulated in a lipid nanoparticle. In some embodiments, the mRNA may be encapsulated in the same lipid nanoparticle. In some embodiments, the mRNA may be encapsulated in different lipid nanoparticles. In some embodiments, the mRNA is encapsulated in one or more lipid nanoparticles, which differ in their lipid composition, molar ratio of lipid components, size, charge (zeta potential), targeting ligands and/or combinations thereof. In some embodiments, the one or more lipid nanoparticles may have a different composition of sterol-based cationic lipids, neutral lipids, PEG-modified lipids and/or combinations thereof. In some embodiments the one or more lipid nanoparticles may have a different molar ratio of cholesterol-based lipids, cationic lipids, neutral lipids, and PEG-modified lipids used to create the lipid nanoparticles.

[0241] The process of incorporation of a desired mRNA into a lipid nanoparticle is often referred to as “loading”. Exemplary methods are described in Lasic, et al. FEBS Lett., 312:255-258, 1992, which is incorporated herein by reference. The lipid nanoparticle-incorporated nucleic acids may be completely or partially located in the interior space of the lipid nanoparticle, within the bilayer membrane of the lipid nanoparticle, or associated with the exterior surface of the lipid nanoparticle membrane. The incorporation of an mRNA into lipid nanoparticles is also referred to herein as “encapsulation” wherein the nucleic acid is entirely contained within the interior space of the lipid nanoparticle. The purpose of incorporating an mRNA into a lipid nanoparticle is often to protect the mRNA from an environment which may contain enzymes or chemicals that degrade mRNA and/or systems or receptors that cause the rapid excretion of the mRNA. Accordingly, in some embodiments, a suitable lipid nanoparticle is capable of enhancing the stability of the mRNA contained therein and/or facilitate the delivery of an mRNA to the target cell or tissue.

[0242] Suitable lipid nanoparticles in accordance with the present invention may be made in various sizes. In some embodiments, provided lipid nanoparticles may be made smaller than previously known lipid nanoparticles. In some embodiments, decreased size of lipid nanoparticles is associated with more efficient delivery of an mRNA. Selection of an appropriate lipid nanoparticle size may take into consideration the site of the target cell or tissue and to some extent the application for which the lipid nanoparticle is being made.

[0243] In some embodiments, an appropriate size of lipid nanoparticle is selected to facilitate systemic distribution of the mRNA. Alternatively or additionally, a lipid nanoparticle may be sized such that the dimensions of the lipid nanoparticle are of a sufficient diameter to limit or expressly avoid distribution into certain cells or tissues.

[0244] A variety of alternative methods known in the art are available for sizing of a population of lipid nanoparticles. One such sizing method is described in U.S. Pat. No. 4,737,323, incorporated herein by reference. Sonicating a lipid nanoparticles suspension either by bath or probe sonication produces a progressive size reduction down to small ULV less than about 0.05 microns in diameter. Homogenization is another method that relies on shearing energy to fragment large lipid nanoparticles into smaller ones. In a typical homogenization procedure, MLV are recirculated through a standard emulsion homogenizer until selected lipid nanoparticle sizes, typically between about 0.1 and 0.5 microns, are observed. The size of the lipid nanoparticles may be determined by quasi-electric light scattering (QELS) as described in Bloomfield, Ann. Rev. Biophys. Bioeng., 10:421-450 (1981), incorporated herein by reference. Average lipid nanoparticle diameter may be reduced by sonication of formed lipid nanoparticles. Intermittent sonication cycles may be alternated with QELS assessment to guide efficient lipid nanoparticle synthesis.

### Lipid Nanoparticle Formulations

[0245] In some embodiments, the majority of purified lipid nanoparticles in a pharmaceutical composition, i.e., greater than about 50%, 55%, 60%, 65%, 70%, 75%, 80%, 85%, 90%, 95%, 96%, 97%, 98%, or 99% of the lipid nanoparticles, have a size of about 150 nm (e.g., about 145 nm, about 140 nm, about 135 nm, about 130 nm, about 125 nm, about 120 nm, about 115 nm, about 110 nm, about 105 nm, about 100 nm, about 95 nm, about 90 nm, about 85 nm, or about 80 nm). In some embodiments, substantially all of the purified lipid nanoparticles have a size of about 150 nm (e.g., about 145 nm, about 140 nm, about 135 nm, about 130 nm, about 125 nm, about 120 nm, about 115 nm, about 110 nm, about 105 nm, about 100 nm, about 95 nm, about 90 nm, about 85 nm, or about 80 nm).

[0246] In some embodiments, a lipid nanoparticle has an average size of less than 150 nm. In some embodiments, a lipid nanoparticle has an average size of less than 120 nm. In some embodiments, a lipid nanoparticle has an average size of less than 100 nm. In some embodiments, a lipid nanoparticle has an average size of less than 90 nm. In some embodiments, a lipid nanoparticle has an average size of less than 80 nm. In some embodiments, a lipid nanoparticle has an average size of less than 70 nm. In some embodiments, a lipid nanoparticle has an average size of less than 60 nm. In some embodiments, a lipid nanoparticle has an average size of less than 50 nm. In some embodiments, a lipid nanoparticle has an average size of less than 30 nm. In some embodiments, a lipid nanoparticle has an average size of less than 20 nm.

[0247] In some embodiments, greater than about 70%, 75%, 80%, 85%, 90%, 95%, 96%, 97%, 98%, 99% of the lipid nanoparticles in a pharmaceutical composition provided by the present invention have a size ranging from about 40-90 nm (e.g., about 45-85 nm, about 50-80 nm, about 55-75 nm, about 60-70 nm). In some embodiments, substantially all of the lipid nanoparticles have a size ranging from about 40-90 nm (e.g., about 45-85 nm, about 50-80 nm, about 55-75 nm, about 60-70 nm). Compositions with lipid nanoparticles having an average size of about 50-70 nm (e.g., 55-65 nm) are particular suitable for pulmonary delivery via nebulization.

[0248] In some embodiments, the dispersity, or measure of heterogeneity in size of molecules (PDI), of lipid nanoparticles in a pharmaceutical composition provided by the present invention is less than about 0.5. In some embodiments, a lipid nanoparticle has a PDI of less than about 0.5.

[0249] In some embodiments, a lipid nanoparticle has a PDI of less than about 0.4. In some embodiments, a lipid nanoparticle has a PDI of less than about 0.3. In some embodiments, a lipid nanoparticle has a PDI of less than about 0.28. In some embodiments, a lipid nanoparticle has a PDI of less than about 0.25. In some embodiments, a lipid nanoparticle has a PDI of less than about 0.23. In some embodiments, a lipid nanoparticle has a PDI of less than about 0.20. In some embodiments, a lipid nanoparticle has a PDI of less than about 0.18. In some embodiments, a lipid nanoparticle has a PDI of less than about 0.16. In some embodiments, a lipid nanoparticle has a PDI of less than about 0.14. In some embodiments, a lipid nanoparticle has a PDI of less than about 0.12. In some embodiments, a lipid nanoparticle has a PDI of less than about 0.10. In some embodiments, a lipid nanoparticle has a PDI of less than about 0.08.

[0250] In some embodiments, greater than about 75%, 80%, 85%, 90%, 95%, 96%, 97%, 98%, or 99% of the purified lipid nanoparticles in a pharmaceutical composition provided by the present invention encapsulate an mRNA within each individual particle. In some embodiments, substantially all of the purified lipid nanoparticles in a pharmaceutical composition encapsulate an mRNA within each individual particle. In some embodiments, a lipid nanoparticle has an encapsulation efficiency of between 50% and 99%. In some embodiments, a lipid nanoparticle has an encapsulation efficiency of greater than about 60%. In some embodiments, a lipid nanoparticle has an encapsulation efficiency of greater than about 65%. In some embodiments, a lipid nanoparticle has an encapsulation efficiency of greater than about 70%. In some embodiments, a lipid nanoparticle has an encapsulation efficiency of greater than about 75%. In some embodiments, a lipid nanoparticle has an encapsulation efficiency of greater than about 80%. In some embodiments, a lipid nanoparticle has an encapsulation efficiency of greater than about 85%. In some embodiments, a lipid nanoparticle has an encapsulation efficiency of greater than about 90%. In some embodiments, a lipid nanoparticle has an encapsulation efficiency of greater than about 92%. In some embodiments, a lipid nanoparticle has an encapsulation efficiency of greater than about 95%. In some embodiments, a lipid nanoparticle has an encapsulation efficiency of greater than about 98%. In some embodiments, a lipid nanoparticle has an encapsulation efficiency of greater than about 99%. Typically, lipid nanoparticles for use with the invention have an encapsulation efficiency of at least 90%-95%.

[0251] In some embodiments, a lipid nanoparticle has a N/P ratio of between 1 and 10. In some embodiments, a lipid nanoparticle has a N/P ratio above 1. In some embodiments, a lipid nanoparticle has a N/P ratio of about 1. In some embodiments, a lipid nanoparticle has a N/P ratio of about 2. In some embodiments, a lipid nanoparticle has a N/P ratio of about 3. In some embodiments, a lipid nanoparticle has a N/P ratio of about 4. In some embodiments, a lipid nanoparticle has a N/P ratio of about 5. In some embodiments, a lipid nanoparticle has a N/P ratio of about 6. In some embodiments, a lipid nanoparticle has a N/P ratio of about 7. In some embodiments, a lipid nanoparticle has a N/P ratio of about 8. A typical lipid nanoparticle for use with the invention has an N/P ratio of about 4.

[0252] In some embodiments, a pharmaceutical composition according to the present invention contains at least about 0.5 mg, 1 mg, 5 mg, 10 mg, 100 mg, 500 mg, or 1000 mg of encapsulated mRNA. In some embodiments, a pharmaceutical composition contains about 0.1 mg to 1000 mg of encapsulated mRNA. In some embodiments, a pharmaceutical composition contains at least about 0.5 mg of encapsulated mRNA. In some embodiments, a pharmaceutical composition contains at least about 0.8 mg of encapsulated mRNA. In some embodiments, a pharmaceutical composition contains at least about 1 mg of encapsulated mRNA. In some embodiments, a pharmaceutical composition contains at least about 5 mg of encapsulated mRNA. In some embodiments, a pharmaceutical composition contains at least about 8 mg of encapsulated mRNA.

[0253] In some embodiments, a pharmaceutical composition contains at least about 10 mg of encapsulated mRNA. In some embodiments, a pharmaceutical composition contains at least about 50 mg of encapsulated mRNA. In some embodiments, a pharmaceutical composition contains at least about 100 mg of encapsulated mRNA. In some embodiments, a pharmaceutical composition contains at least about 500 mg of encapsulated mRNA. In some embodiments, a pharmaceutical composition contains at least about 1000 mg of encapsulated mRNA.

### Cationic Lipids

[0254] Suitable cationic lipids for use in the pharmaceutical compositions and methods of the invention include the cationic lipids as described in International Patent Publication WO 2010/144740, which is incorporated herein by reference. In some embodiments, the pharmaceutical compositions and methods of the present invention include a cationic lipid, (6Z,9Z,28Z,31Z)-heptatriaconta-6,9,28,31-tetraen-19-yl 4-(dimethylamino) butanoate, having a compound structure of:

[chemical structure]

and pharmaceutically acceptable salts thereof.

[0255] Other suitable cationic lipids for use in the pharmaceutical compositions and methods of the present invention include ionizable cationic lipids as described in International Patent Publication WO 2013/149140, which is incorporated herein by reference. In some embodiments, the pharmaceutical compositions and methods of the present invention include a cationic lipid of one of the following formulas:

[chemical structure]

or a pharmaceutically acceptable salt thereof, wherein R₁ and R₂ are each independently selected from the group consisting of hydrogen, an optionally substituted, variably saturated or unsaturated C₁-C₂₀ alkyl and an optionally substituted, variably saturated or unsaturated C₆-C₂₀ acyl; wherein L₁ and L₂ are each independently selected from the group consisting of hydrogen, an optionally substituted C₁-C₃₀ alkyl, an optionally substituted variably unsaturated C₁-C₃₀ alkenyl, and an optionally substituted C₁-C₃₀ alkynyl; wherein m and o are each independently selected from the group consisting of zero and any positive integer (e.g., where m is three); and wherein n is zero or any positive integer (e.g., where n is one). In some embodiments, the pharmaceutical compositions and methods of the present invention include the cationic lipid (15Z, 18Z)—N,N-dimethyl-6-(9Z,12Z)-octadeca-9,12-dien-1-yl) tetracosa-15,18-dien-1-amine (“HGT5000”), having a compound structure of:

[chemical structure]

and pharmaceutically acceptable salts thereof. In some embodiments, the pharmaceutical compositions and methods of the present invention include the cationic lipid (15Z, 18Z)—N,N-dimethyl-6-((9Z,12Z)-octadeca-9,12-dien-1-yl) tetracosa-4,15,18-trien-1-amine (“HGT5001”), having a compound structure of:

[chemical structure]

and pharmaceutically acceptable salts thereof. In some embodiments, the pharmaceutical compositions and methods of the present invention include the cationic lipid and (15Z,18Z)—N,N-dimethyl-6-((9Z,12Z)-octadeca-9,12-dien-1-yl) tetracosa-5,15,18-trien-1-amine (“HGT5002”), having a compound structure of:

[chemical structure]

and pharmaceutically acceptable salts thereof.

[0256] Other suitable cationic lipids for use in the pharmaceutical compositions and methods of the invention include cationic lipids described as aminoalcohol lipidoids in International Patent Publication WO 2010/053572, which is incorporated herein by reference. In some embodiments, the pharmaceutical compositions and methods of the present invention include a cationic lipid having a compound structure of:

[chemical structure]

and pharmaceutically acceptable salts thereof.

[0257] Other suitable cationic lipids for use in the pharmaceutical compositions and methods of the invention include the cationic lipids as described in International Patent Publication WO 2016/118725, which is incorporated herein by reference. In some embodiments, the pharmaceutical compositions and methods of the present invention include a cationic lipid having a compound structure of:

[chemical structure]

and pharmaceutically acceptable salts thereof.

[0258] Other suitable cationic lipids for use in the pharmaceutical compositions and methods of the invention include the cationic lipids as described in International Patent Publication WO 2016/118724, which is incorporated herein by reference. In some embodiments, the pharmaceutical compositions and methods of the present invention include a cationic lipid having a compound structure of:

[chemical structure]

and pharmaceutically acceptable salts thereof.

[0259] Other suitable cationic lipids for use in the pharmaceutical compositions and methods of the invention include a cationic lipid having the formula of 14,25-ditridecyl 15,18,21,24-tetraaza-octatriacontane, and pharmaceutically acceptable salts thereof.

[0260] Other suitable cationic lipids for use in the pharmaceutical compositions and methods of the invention include the cationic lipids as described in International Patent Publications WO 2013/063468 and WO 2016/205691, each of which are incorporated herein by reference. In some embodiments, the pharmaceutical compositions and methods of the present invention include a cationic lipid of the following formula:

[chemical structure]

or pharmaceutically acceptable salts thereof, wherein each instance of R^{L} is independently optionally substituted C₆-C₄₀ alkenyl. In some embodiments, the pharmaceutical compositions and methods of the present invention include a cationic lipid having a compound structure of:

[chemical structure]

and pharmaceutically acceptable salts thereof. In some embodiments, the pharmaceutical compositions and methods of the present invention include a cationic lipid having a compound structure of:

[chemical structure]

and pharmaceutically acceptable salts thereof.
In some embodiments, the pharmaceutical compositions and methods of the present invention include a cationic lipid having a compound structure of:

[chemical structure]

and pharmaceutically acceptable salts thereof. In some embodiments, the pharmaceutical compositions and methods of the present invention include a cationic lipid having a compound structure of:

[chemical structure]

and pharmaceutically acceptable salts thereof. In some embodiments, the pharmaceutical compositions and methods of the present invention include a cationic lipid having a compound structure of:

[chemical structure]

and pharmaceutically acceptable salts thereof. In some embodiments, the pharmaceutical compositions and methods of the present invention include a cationic lipid having a compound structure of:

[chemical structure]

and pharmaceutically acceptable salts thereof.

[0261] Other suitable cationic lipids for use in the pharmaceutical compositions and methods of the invention include the cationic lipids as described in International Patent Publication WO 2015/184256, which is incorporated herein by reference. In some embodiments, the pharmaceutical compositions and methods of the present invention include a cationic lipid of the following formula:

[chemical structure]

or a pharmaceutically acceptable salt thereof, wherein each X independently is O or S; each Y independently is O or S; each m independently is 0 to 20; each n independently is 1 to 6; each R_{A} is independently hydrogen, optionally substituted C1-50 alkyl, optionally substituted C2-50 alkenyl, optionally substituted C2-50 alkynyl, optionally substituted C3-10 carbocyclyl, optionally substituted 3-14 membered heterocyclyl, optionally substituted C6-14 aryl, optionally substituted 5-14 membered heteroaryl or halogen; and each R_{B} is independently hydrogen, optionally substituted C1-50 alkyl, optionally substituted C2-50 alkenyl, optionally substituted C2-50 alkynyl, optionally substituted C3-10 carbocyclyl, optionally substituted 3-14 membered heterocyclyl, optionally substituted C6-14 aryl, optionally substituted 5-14 membered heteroaryl or halogen. In some embodiments, the pharmaceutical compositions and methods of the present invention include a cationic lipid, “Target 23”, having a compound structure of:

[chemical structure]

and pharmaceutically acceptable salts thereof.

[0262] Other suitable cationic lipids for use in the pharmaceutical compositions and methods of the invention include the cationic lipids as described in International Patent Publication WO 2016/004202, which is incorporated herein by reference. In some embodiments, the pharmaceutical compositions and methods of the present invention include a cationic lipid having the compound structure:

[chemical structure]

or a pharmaceutically acceptable salt thereof. In some embodiments, the pharmaceutical compositions and methods of the present invention include a cationic lipid having the compound structure:

[chemical structure]

or a pharmaceutically acceptable salt thereof. In some embodiments, the pharmaceutical compositions and methods of the present invention include a cationic lipid having the compound structure:

[chemical structure]

or a pharmaceutically acceptable salt thereof.

[0263] Other suitable cationic lipids for use in the pharmaceutical compositions and methods of the present invention include cationic lipids as described in U.S. Provisional Patent Application Ser. No. 62/758,179, filed on Nov. 9, 2018, and Provisional Patent Application Ser. No. 62/871,510, filed on Jul. 8, 2019, which are incorporated herein by reference. In some embodiments, the pharmaceutical compositions and methods of the present invention include a cationic lipid of the following formula:

[chemical structure]

or a pharmaceutically acceptable salt thereof, wherein each R¹ and R² is independently H or C₁-C₆ aliphatic; each m is independently an integer having a value of 1 to 4; each A is independently a covalent bond or arylene; each L′ is independently an ester, thioester, disulfide, or anhydride group; each L² is independently C₂-C₁₀ aliphatic; each X¹ is independently H or OH; and each R³ is independently C₆-C₂₀ aliphatic. In some embodiments, the pharmaceutical compositions and methods of the present invention include a cationic lipid of the following formula:

[chemical structure]

or a pharmaceutically acceptable salt thereof. In some embodiments, the pharmaceutical compositions and methods of the present invention include a cationic lipid of the following formula:

[chemical structure]

or a pharmaceutically acceptable salt thereof. In some embodiments, the pharmaceutical compositions and methods of the present invention include a cationic lipid of the following formula:

[chemical structure]

or a pharmaceutically acceptable salt thereof.

[0264] Other suitable cationic lipids for use in the pharmaceutical compositions and methods of the present invention include the cationic lipids as described in J. McClellan, M. C. King, Cell 2010, 141, 210-217 and in Whitehead et al., Nature Communications (2014) 5:4277, which is incorporated herein by reference. In some embodiments, the cationic lipids of the pharmaceutical compositions and methods of the present invention include a cationic lipid having a compound structure of:

[chemical structure]

and pharmaceutically acceptable salts thereof.

[0265] Other suitable cationic lipids for use in the pharmaceutical compositions and methods of the invention include the cationic lipids as described in International Patent Publication WO 2015/199952, which is incorporated herein by reference. In some embodiments, the pharmaceutical compositions and methods of the present invention include a cationic lipid having the compound structure:

[chemical structure]

and pharmaceutically acceptable salts thereof. In some embodiments, the pharmaceutical compositions and methods of the present invention include a cationic lipid having the compound structure:

[chemical structure]

and pharmaceutically acceptable salts thereof. In some embodiments, the pharmaceutical compositions and methods of the present invention include a cationic lipid having the compound structure:

[chemical structure]

and pharmaceutically acceptable salts thereof. In some embodiments, the pharmaceutical compositions and methods of the present invention include a cationic lipid having the compound

[chemical structure]

and pharmaceutically acceptable salts thereof. In some embodiments, the pharmaceutical compositions and methods of the present invention include a cationic lipid having the compound structure:

[chemical structure]

and pharmaceutically acceptable salts thereof. In some embodiments, the pharmaceutical compositions and methods of the present invention include a cationic lipid having the compound structure:

[chemical structure]

and pharmaceutically acceptable salts thereof. In some embodiments, the pharmaceutical compositions and methods of the present invention include a cationic lipid having the compound structure:

[chemical structure]

and pharmaceutically acceptable salts thereof. In some embodiments, the pharmaceutical compositions and methods of the present invention include a cationic lipid having the compound structure:

[chemical structure]

and pharmaceutically acceptable salts thereof. In some embodiments, the pharmaceutical compositions and methods of the present invention include a cationic lipid having the compound structure:

[chemical structure]

and pharmaceutically acceptable salts thereof. In some embodiments, the pharmaceutical compositions and methods of the present invention include a cationic lipid having the compound structure:

[chemical structure]

and pharmaceutically acceptable salts thereof. In some embodiments, the pharmaceutical compositions and methods of the present invention include a cationic lipid having the compound

[chemical structure]

and pharmaceutically acceptable salts thereof. In some embodiments, the pharmaceutical compositions and methods of the present invention include a cationic lipid having the compound structure:

[chemical structure]

and pharmaceutically acceptable salts thereof. In some embodiments, the pharmaceutical compositions and methods of the present invention include a cationic lipid having the compound structure:

[chemical structure]

and pharmaceutically acceptable salts thereof.

[0266] Other suitable cationic lipids for use in the pharmaceutical compositions and methods of the invention include the cationic lipids as described in International Patent Publication WO 2017/004143, which is incorporated herein by reference. In some embodiments, the pharmaceutical compositions and methods of the present invention include a cationic lipid having the compound structure:

[chemical structure]

and pharmaceutically acceptable salts thereof. In some embodiments, the pharmaceutical compositions and methods of the present invention include a cationic lipid having the compound structure:

[chemical structure]

and pharmaceutically acceptable salts thereof. In some embodiments, the pharmaceutical compositions and methods of the present invention include a cationic lipid having the compound structure:

[chemical structure]

and pharmaceutically acceptable salts thereof. In some embodiments, the pharmaceutical compositions and methods of the present invention include a cationic lipid having the compound structure:

[chemical structure]

and pharmaceutically acceptable salts thereof. In some embodiments, the pharmaceutical compositions and methods of the present invention include a cationic lipid having the compound

[chemical structure]

and pharmaceutically acceptable salts thereof. In some embodiments, the pharmaceutical compositions and methods of the present invention include a cationic lipid having the compound structure:

[chemical structure]

and pharmaceutically acceptable salts thereof. In some embodiments, the pharmaceutical compositions and methods of the present invention include a cationic lipid having the compound structure:

[chemical structure]

and pharmaceutically acceptable salts thereof. In some embodiments, the pharmaceutical compositions and methods of the present invention include a cationic lipid having the compound structure:

[chemical structure]

and pharmaceutically acceptable salts thereof. In some embodiments, the pharmaceutical compositions and methods of the present invention include a cationic lipid having the compound

[chemical structure]

and pharmaceutically acceptable salts thereof. In some embodiments, the pharmaceutical compositions and methods of the present invention include a cationic lipid having the compound structure:

[chemical structure]

and pharmaceutically acceptable salts thereof. In some embodiments, the pharmaceutical compositions and methods of the present invention include a cationic lipid having the compound structure:

[chemical structure]

and pharmaceutically acceptable salts thereof. In some embodiments, the pharmaceutical compositions and methods of the present invention include a cationic lipid having the compound

[chemical structure]

and pharmaceutically acceptable salts thereof. In some embodiments, the pharmaceutical compositions and methods of the present invention include a cationic lipid having the compound structure:

[chemical structure]

and pharmaceutically acceptable salts thereof. In some embodiments, the pharmaceutical compositions and methods of the present invention include a cationic lipid having the compound structure:

[chemical structure]

and pharmaceutically acceptable salts thereof. In some embodiments, the pharmaceutical compositions and methods of the present invention include a cationic lipid having the compound

[chemical structure]

and pharmaceutically acceptable salts thereof. In some embodiments, the pharmaceutical compositions and methods of the present invention include a cationic lipid having the compound structure:

[chemical structure]

and pharmaceutically acceptable salts thereof. In some embodiments, the pharmaceutical compositions and methods of the present invention include a cationic lipid having the compound structure:

[chemical structure]

and pharmaceutically acceptable salts thereof.

[0267] Other suitable cationic lipids for use in the pharmaceutical compositions and methods of the invention include the cationic lipids as described in International Patent Publication WO 2017/075531, which is incorporated herein by reference. In some embodiments, the pharmaceutical compositions and methods of the present invention include a cationic lipid of the following formula:

[chemical structure]

or a pharmaceutically acceptable salt thereof, wherein one of L¹ or L² is —O(C═O)—, —(C═O)O—, —C(═O)—, —O—, —S(O)ₓ, —S—S—, —C(═O)S—, —SC(═O)—, —NR^{a}C(═O)—, —C(═O)NR^{a}—, NR^{a}C(═O)NR^{a}—, —OC(═O)NR^{a}—, or —NR^{a}C(═O)O—; and the other of L¹ or L² is —O(C═O)—, —(C═O)O—, —C(═O)—, —O—, —S(O)ₓ, —S—S—, —C(═O)S—, SC(═O)—, —NR^{a}C(═O)—, —C(═O)NR^{a}—, —NR^{a}C(═O)NR^{a}—, —OC(═O)NR^{a}— or —NR^{a}C(═O)O— or a direct bond; G¹ and G² are each independently unsubstituted C₁-C₁₂ alkylene or C₁-C₁₂ alkenylene; G³ is C₁-C₂₄ alkylene, C₁-C₂₄ alkenylene, C₃-C₈ cycloalkylene, C₃-C₈ cycloalkenylene; R^{a} is H or C₁-C₁₂ alkyl; R¹ and R² are each independently C₆-C₂₄ alkyl or C₆-C₂₄ alkenyl; R³ is H, OR⁵, CN, —C(═O)OR⁴, —OC(═O)R⁴ or —NR⁵C(═O)R⁴; R⁴ is C₁-C₁₂ alkyl; R⁵ is H or C₁-C₆ alkyl; and x is 0, 1 or 2.

[0268] Other suitable cationic lipids for use in the pharmaceutical compositions and methods of the invention include the cationic lipids as described in International Patent Publication WO 2017/117528, which is incorporated herein by reference. In some embodiments, the pharmaceutical compositions and methods of the present invention include a cationic lipid having the compound structure:

[chemical structure]

and pharmaceutically acceptable salts thereof. In some embodiments, the pharmaceutical compositions and methods of the present invention include a cationic lipid having the compound structure:

[chemical structure]

and pharmaceutically acceptable salts thereof. In some embodiments, the pharmaceutical compositions and methods of the present invention include a cationic lipid having the compound structure:

[chemical structure]

and pharmaceutically acceptable salts thereof.

[0269] Other suitable cationic lipids for use in the pharmaceutical compositions and methods of the invention include the cationic lipids as described in International Patent Publication WO 2017/049245, which is incorporated herein by reference. In some embodiments, the cationic lipids of the pharmaceutical compositions and methods of the present invention include a compound of one of the following formulas:

[chemical structure]

and pharmaceutically acceptable salts thereof. For any one of these four formulas, R⁴ is independently selected from —(CH₂)ₙQ and —(CH₂)ₙCHQR; Q is selected from the group consisting of —OR, —OH, —O(CH₂)ₙN(R)₂, —OC(O)R, —CX₃, —CN, —N(R) C(O)R, —N(H)C(O)R, —N(R)S(O)₂R, —N(H)S(O)₂R, —N(R)C(O)N(R)₂, —N(H)C(O)N(R)₂, —N(H)C(O)N(H)(R), —N(R)C(S)N(R)₂, —N(H)C(S)N(R)₂, —N(H)C(S)N(H)(R), and a heterocycle; and n is 1, 2, or 3. In some embodiments, the pharmaceutical compositions and methods of the present invention include a cationic lipid having a compound structure of:

[chemical structure]

and pharmaceutically acceptable salts thereof. In some embodiments, the pharmaceutical compositions and methods of the present invention include a cationic lipid having a compound structure of:

[chemical structure]

and pharmaceutically acceptable salts thereof. In some embodiments, the pharmaceutical compositions and methods of the present invention include a cationic lipid having a compound structure of:

[chemical structure]

pharmaceutically acceptable salts thereof. In some embodiments, the pharmaceutical compositions and methods of the present invention include a cationic lipid having a compound structure of:

[chemical structure]

and pharmaceutically acceptable salts thereof.

[0270] Other suitable cationic lipids for use in the pharmaceutical compositions and methods of the invention include the cationic lipids as described in International Patent Publication WO 2017/173054 and WO 2015/095340, each of which is incorporated herein by reference. In some embodiments, the pharmaceutical compositions and methods of the present invention include a cationic lipid having a compound structure of:

[chemical structure]

and pharmaceutically acceptable salts thereof. In some embodiments, the pharmaceutical compositions and methods of the present invention include a cationic lipid having a compound structure of:

[chemical structure]

and pharmaceutically acceptable salts thereof. In some embodiments, the pharmaceutical compositions and methods of the present invention include a cationic lipid having a compound structure of:

[chemical structure]

and pharmaceutically acceptable salts thereof. In some embodiments, the pharmaceutical compositions and methods of the present invention include a cationic lipid having a compound structure of:

[chemical structure]

and pharmaceutically acceptable salts thereof.

[0271] Other suitable cationic lipids for use in the pharmaceutical compositions and methods of the present invention include cationic lipids as described in U.S. Provisional Patent Application Ser. No. 62/865,555, filed on Jun. 24, 2019, which is incorporated herein by reference. In some embodiments, the pharmaceutical compositions and methods of the present invention include a cationic lipid having a compound structure of:

[chemical structure]

and pharmaceutically acceptable salts thereof.

[0272] Other suitable cationic lipids for use in the pharmaceutical compositions and methods of the present invention include cationic lipids as described in U.S. Provisional Patent Application Ser. No. 62/864,818, filed on Jun. 21, 2019, which is incorporated herein by reference. In some embodiments, the pharmaceutical compositions and methods of the present invention include a cationic lipid having a compound structure according to the following formula:

[chemical structure]

or a pharmaceutically acceptable salt thereof, wherein each of R², R³, and R⁴ is independently C₆-C₃₀ alkyl, C₆-C₃₀ alkenyl, or C₆-C₃₀ alkynyl; L¹ is C₁-C₃₀ alkylene; C₂-C₃₀ alkenylene; or C₂-C₃₀ alkynylene and B¹ is an ionizable nitrogen-containing group. In embodiments, L¹ is C₁-C₁₀ alkylene. In embodiments, L¹ is unsubstituted C₁-C₁₀ alkylene. In embodiments, L¹ is (CH₂)₂, (CH₂)₃, (CH₂)₄, or (CH₂)₅. In embodiments, L¹ is (CH₂), (CH₂)₆, (CH₂)₇, (CH₂)₈, (CH₂)₉, or (CH₂)₁₀. In embodiments, B¹ is independently NH₂, guanidine, amidine, a mono- or dialkylamine, 5- to 6-membered nitrogen-containing heterocycloalkyl, or 5- to 6-membered nitrogen-containing heteroaryl. In embodiments, B1 is

[chemical structure]

In embodiments, B¹ is

[chemical structure]

In embodiments, B¹ is

[chemical structure]

In embodiments, each of R², R³, and R⁴ is independently unsubstituted linear C₆-C₂₂ alkyl, unsubstituted linear C₆-C₂₂ alkenyl, unsubstituted linear C₆-C₂₂ alkynyl, unsubstituted branched C₆-C₂₂ alkyl, unsubstituted branched C₆-C₂₂ alkenyl, or unsubstituted branched C₆-C₂₂ alkynyl. In embodiments, each of R², R³, and R⁴ is unsubstituted C₆-C₂₂ alkyl. In embodiments, each of R², R³, and R⁴ is —C₆H₁₃, —C₇H₁₅, —C₈H₁₇, —C₉H₁₉, —C₁₀H₂₁, —C₁₁H₂₃, —C₁₂H₂₅, —C₁₃H₂₇, —C₁₄H₂₉, —C₁₅H₃₁, —C₁₆H₃₃, —C₁₇H₃₅, —C₁₈H₃₇, —C₁₉H₃₉, —C₂₀H₄₁, —C₂₁H₄₃, —C₂₂H₄₅, —C₂₃H₄₇, —C₂₄H₄₉, or —C₂₅H₅₁. In embodiments, each of R², R³, and R⁴ is independently C₆-C₁₂ alkyl substituted by —O(CO)R⁵ or —C(O)OR⁵, wherein R⁵ is unsubstituted C₆-C₁₄ alkyl. In embodiments, each of R², R³, and R⁴ is unsubstituted C₆-C₂₂ alkenyl. In embodiments, each of R², R³, and R⁴ is —(CH₂)₄CH═CH₂, —(CH₂)₅CH═CH₂, —(CH₂)₆CH═CH₂, —(CH₂)₇CH═CH₂, —(CH₂)₈CH═CH₂, —(CH₂)₉CH═CH₂, —(CH₂)₁₀CH═CH₂, —(CH₂)₁₁CH═CH₂, —(CH₂)₁₂CH═CH₂, —(CH₂)₁₃CH═CH₂, —(CH₂)₁₄CH═CH₂, —(CH₂)₁₅CH═CH₂, —(CH₂)₁₆CH═CH₂, —(CH₂)₁₇CH═CH₂, —(CH₂)₁₈CH═CH₂, —(CH₂)₇CH═CH(CH₂)₃CH₃, —(CH₂)₇CH═CH(CH₂)₅CH₃, —(CH₂)₄CH═CH(CH₂)₈CH₃, —(CH₂)₇CH═CH(CH₂)₇CH₃, —(CH₂)₆CH═CHCH₂CH═CH(CH₂)₄CH₃, —(CH₂)₇CH═CHCH₂CH═CH(CH₂)₄CH₃, —(CH₂)₇CH═CHCH₂CH═CHCH₂CH═CHCH₂CH₃, —(CH₂)₃CH═CHCH₂CH═CHCH₂CH═CHCH₂CH═CH(CH₂)₄CH₃, —(CH₂)₃CH═CHCH₂CH═CHCH₂CH═CHCH₂CH═CHCH₂CH═CHCH₂CH₃, —(CH₂)₁₁CH═CH(CH₂)/CH₃, or —(CH₂)₂CH═CHCH₂CH═CHCH₂CH═CHCH₂CH═CHCH₂CH═CHCH₂CH═CHCH₂CH₃.
In embodiments, said C₆-C₂₂ alkenyl is a monoalkenyl, a dienyl, or a trienyl. In embodiments, each of R², R³, and R⁴ is

[chemical structure]

In some embodiments, the pharmaceutical compositions and methods of the present invention include a cationic lipid having a compound structure of:

[chemical structure]

and pharmaceutically acceptable salts thereof. In some embodiments, the pharmaceutical compositions and methods of the present invention include a cationic lipid having a compound structure of:

[chemical structure]

and pharmaceutically acceptable salts thereof. In some embodiments, the pharmaceutical compositions and methods of the present invention include a cationic lipid having a compound structure of:

[chemical structure]

and pharmaceutically acceptable salts thereof. In some embodiments, the pharmaceutical compositions and methods of the present invention include a cationic lipid having a compound structure of:

[chemical structure]

and pharmaceutically acceptable salts thereof.

[0273] Other suitable cationic lipids for use in the pharmaceutical compositions and methods of the present invention include cleavable cationic lipids as described in International Patent Publication WO 2012/170889, which is incorporated herein by reference. In some embodiments, the pharmaceutical compositions and methods of the present invention include a cationic lipid of the following formula:

[chemical structure]

wherein R₁ is selected from the group consisting of imidazole, guanidinium, amino, imine, enamine, an optionally-substituted alkyl amino (e.g., an alkyl amino such as dimethylamino) and pyridyl; wherein R2 is selected from the group consisting of one of the following two formulas:

[chemical structure]

and wherein R₃ and R₄ are each independently selected from the group consisting of an optionally substituted, variably saturated or unsaturated C₆-C₂₀ alkyl and an optionally substituted, variably saturated or unsaturated C₆-C₂₀ acyl; and wherein n is zero or any positive integer (e.g., one, two, three, four, five, six, seven, eight, nine, ten, eleven, twelve, thirteen, fourteen, fifteen, sixteen, seventeen, eighteen, nineteen, twenty or more). In some embodiments, the pharmaceutical compositions and methods of the present invention include a cationic lipid, “HGT4001”, having a compound structure of:

[chemical structure]

and pharmaceutically acceptable salts thereof. In some embodiments, the pharmaceutical compositions and methods of the present invention include a cationic lipid, “HGT4002”, having a compound structure of:

[chemical structure]

and pharmaceutically acceptable salts thereof. In some embodiments, the pharmaceutical compositions and methods of the present invention include a cationic lipid, “HGT4003,” having a compound structure of:

[chemical structure]

and pharmaceutically acceptable salts thereof. In some embodiments, the pharmaceutical compositions and methods of the present invention include a cationic lipid, “HGT4004,” having a compound structure of:

[chemical structure]

and pharmaceutically acceptable salts thereof. In some embodiments, the pharmaceutical compositions and methods of the present invention include a cationic lipid “HGT4005,” having a compound structure of:

[chemical structure]

and pharmaceutically acceptable salts thereof.

[0274] Other suitable cationic lipids for use in the pharmaceutical compositions and methods of the present invention include cleavable cationic lipids as described in International Patent Publication WO 2019/222424, and incorporated herein by reference. In some embodiments, the pharmaceutical compositions and methods of the present invention include a cationic lipid that is any of general formulas or any of structures (1a) (21a) and (1b)-(21b) and (22)-(237) described in International Patent Publication WO 2019/222424. In some embodiments, the pharmaceutical compositions and methods of the present invention include a cationic lipid that has a structure according to Formula (I′),

[chemical structure]

wherein:
[0275] R^{X} is independently —H, -L¹-R¹, or -L^{5A}-L^{5B}-B′;
[0276] each of L¹, L², and L³ is independently a covalent bond, —C(O)—, —C(O)O—, —C(O)S—, or —C(O)NR^{L}—;
[0277] each L^{4A} and L^{5A} is independently-C(O)—, —C(O)O—, or —C(O)NR^{L}—;
[0278] each L^{4B} and L^{5B} is independently C₁-C₂₀ alkylene; C₂-C₂₀ alkenylene; or C₂-C₂₀ alkynylene;
[0279] each B and B′ is NR⁴R⁵ or a 5- to 10-membered nitrogen-containing heteroaryl;
[0280] each R¹, R², and R³ is independently C₆-C₃₀ alkyl, C₆-C₃₀ alkenyl, or C₆-C₃₀ alkynyl;
[0281] each R⁴ and R⁵ is independently hydrogen, C₁-C₁₀ alkyl; C₂-C₁₀ alkenyl; or C₂-C₁₀ alkynyl; and
[0282] each R^{L} is independently hydrogen, C₁-C₂₀ alkyl, C₂-C₂₀ alkenyl, or C₂-C₂₀ alkynyl.
   In some embodiments, the pharmaceutical compositions and methods of the present invention include a cationic lipid that is Compound (139) of International Application No. PCT/US2019/032522, having a compound structure of:

[chemical structure]

(“18:1 Carbon tail-ribose lipid”).

[0283] In some embodiments, the pharmaceutical compositions and methods of the present invention include a cationic lipid that is RL3-DMA-07D having a compound structure of:

[chemical structure]

and pharmaceutically acceptable salts thereof.

[0284] In some embodiments, the pharmaceutical compositions and methods of the present invention include the cationic lipid, N-[1-(2,3-dioleyloxy) propyl]-N,N,N-trimethylammonium chloride (“DOTMA”). (Feigner et al. (Proc. Nat'l Acad. Sci. 84, 7413 (1987); U.S. Pat. No. 4,897,355, which is incorporated herein by reference). Other cationic lipids suitable for the pharmaceutical compositions and methods of the present invention include, for example, 5-carboxyspermylglycinedioctadecylamide (“DOGS”); 2,3-dioleyloxy-N-[2 (spermine-carboxamido) ethyl]-N,N-dimethyl-1-propanaminium (“DOSPA”) (Behr et al. Proc. Nat.′l Acad. Sci. 86, 6982 (1989), U.S. Pat. Nos. 5,171,678; 5,334,761); 1,2-Dioleoyl-3-Dimethylammonium-Propane (“DODAP”); 1,2-Dioleoyl-3-Trimethylammonium-Propane (“DOTAP”).

[0285] Additional exemplary cationic lipids suitable for the pharmaceutical compositions and methods of the present invention also include: 1,2-distearyloxy-N,N-dimethyl-3-aminopropane (“DSDMA”); 1,2-dioleyloxy-N,N-dimethyl-3-aminopropane (“DODMA”); 1,2-dilinoleyloxy-N,N-dimethyl-3-aminopropane (“DLinDMA”); 1,2-dilinolenyloxy-N,N-dimethyl-3-aminopropane (“DLenDMA”); N-dioleyl-N,N-dimethylammonium chloride (“DODAC”); N,N-distearyl-N,N-dimethylammonium bromide (“DDAB”); N-(1,2-dimyristyloxyprop-3-yl)-N,N-dimethyl-N-hydroxyethyl ammonium bromide (“DMRIE”); 3-dimethylamino-2-(cholest-5-en-3-beta-oxybutan-4-oxy)-1-(cis, cis-9,12-octadecadienoxy) propane (“CLinDMA”); 2-[5′-(cholest-5-en-3-beta-oxy)-3′-oxapentoxy)-3-dimethy 1-1-(cis, cis-9′, 1-2′-octadecadienoxy) propane (“CpLinDMA”); N,N-dimethyl-3,4-dioleyloxybenzylamine (“DMOBA”); 1,2-N,N′-dioleylcarbamyl-3-dimethylaminopropane (“DOcarbDAP”); 2,3-Dilinoleoyloxy-N,N-dimethylpropylamine (“DLinDAP”); 1,2-N,N′-Dilinoleylcarbamyl-3-dimethylaminopropane (“DLincarbDAP”); 1,2-Dilinoleoylcarbamyl-3-dimethylaminopropane (“DLinCDAP”); 2,2-dilinoleyl-4-dimethylaminomethyl-[1,3]-dioxolane (“DLin-K-DMA”); 2-((8-[(3P)-cholest-5-en-3-yloxy]octyl)oxy)-N, N-dimethyl-3-[(9Z, 12Z)-octadeca-9, 12-dien-1-yloxy]propane-1-amine (“Octyl-CLinDMA”); (2R)-2-((8-[(3beta)-cholest-5-en-3-yloxy]octyl)oxy)-N, N-dimethyl-3-[(9Z, 12Z)-octadeca-9, 12-dien-1-yloxy]propan-1-amine (“Octyl-CLinDMA (2R)”); (2S)-2-((8-[(3P)-cholest-5-en-3-yloxy]octyl)oxy)-N, fsl-dimethyh3-[(9Z, 12Z)-octadeca-9, 12-dien-1-yloxy]propan-1-amine (“Octyl-CLinDMA (2S)”); 2,2-dilinoleyl-4-dimethylaminoethyl-[1,3]-dioxolane (“DLin-K-XTC2-DMA”); and 2-(2,2-di((9Z,12Z)-octadeca-9,1 2-dien-1-yl)-1,3-dioxolan-4-yl)-N,N-dimethylethanamine (“DLin-KC2-DMA”) (see, WO 2010/042877, which is incorporated herein by reference; Semple et al., Nature Biotech. 28:172-176 (2010)). (Heyes, J., et al., J Controlled Release 107:276-287 (2005); Morrissey, D V., et al., Nat. Biotechnol. 23 (8): 1003-1007 (2005); International Patent Publication WO 2005/121348). In some embodiments, one or more of the cationic lipids comprise at least one of an imidazole, dialkylamino, or guanidinium moiety.

[0286] In some embodiments, one or more cationic lipids suitable for the pharmaceutical compositions and methods of the present invention include 2,2-Dilinoley 1-4-dimethylaminoethy 1-[1,3]-dioxolane (“XTC”); (3aR,5s,6aS)-N,N-dimethyl-2,2-di((9Z,12Z)-octadeca-9,12-dienyl)tetrahydro-3aH-cyclopenta [d][1,3]dioxol-5-amine (“ALNY-100”) and/or 4,7,13-tris(3-oxo-3-(undecylamino) propyl)-N1,N16-diundecyl-4,7,10,13-tetraazahexadecane-1,16-diamide (“NC98-5”).

[0287] In some embodiments, the pharmaceutical compositions of the present invention include one or more cationic lipids that constitute at least about 5%, 10%, 20%, 30%, 35%, 40%, 45%, 50%, 55%, 60%, 65%, or 70%, measured by weight, of the total lipid content in the pharmaceutical composition, e.g., a lipid nanoparticle. In some embodiments, the pharmaceutical compositions of the present invention include one or more cationic lipids that constitute at least about 5%, 10%, 20%, 30%, 35%, 40%, 45%, 50%, 55%, 60%, 65%, or 70%, measured as a mol %, of the total lipid content in the pharmaceutical composition, e.g., a lipid nanoparticle. In some embodiments, the pharmaceutical compositions of the present invention include one or more cationic lipids that constitute about 30-70% (e.g., about 30-65%, about 30-60%, about 30-55%, about 30-50%, about 30-45%, about 30-40%, about 35-50%, about 35-45%, or about 35-40%), measured by weight, of the total lipid content in the pharmaceutical composition, e.g., a lipid nanoparticle. In some embodiments, the pharmaceutical compositions of the present invention include one or more cationic lipids that constitute about 30-70% (e.g., about 30-65%, about 30-60%, about 30-55%, about 30-50%, about 30-45%, about 30-40%, about 35-50%, about 35-45%, or about 35-40%), measured as mol %, of the total lipid content in the pharmaceutical composition, e.g., a lipid nanoparticle.

### Non-Cationic Lipids

[0288] In some embodiments, the lipid nanoparticles contain one or more non-cationic lipids. As used herein, the phrase “non-cationic lipid” refers to any neutral, zwitterionic or anionic lipid. As used herein, the phrase “anionic lipid” refers to any of a number of lipid species that carry a net negative charge at a selected pH, such as physiological pH. Non-cationic lipids include, but are not limited to, distearoylphosphatidylcholine (DSPC), dioleoylphosphatidylcholine (DOPC), dipalmitoylphosphatidylcholine (DPPC), dioleoylphosphatidylglycerol (DOPG), dipalmitoylphosphatidylglycerol (DPPG), dioleoylphosphatidylethanolamine (DOPE), palmitoyloleoylphosphatidylcholine (POPC), palmitoyloleoyl-phosphatidylethanolamine (POPE), dioleoyl-phosphatidylethanolamine 4-(N-maleimidomethyl)-cyclohexane-1-carboxylate (DOPE-mal), dipalmitoyl phosphatidyl ethanolamine (DPPE), dimyristoylphosphoethanolamine (DMPE), distearoyl-phosphatidyl-ethanolamine (DSPE), 1,2-dierucoyl-sn-glycero-3-phosphoethanolamine (DEPE), phosphatidylserine, sphingolipids, cerebrosides, gangliosides, 16-O-monomethyl PE, 16-O-dimethyl PE, 18-1-trans PE, 1-stearoyl-2-oleoyl-phosphatidyethanolamine (SOPE), or a mixture thereof. In some embodiments, lipid nanoparticles suitable for use with the invention include DOPE as the non-cationic lipid component. In other embodiments, lipid nanoparticles suitable for use with the invention include DEPE as the non-cationic lipid component.

[0289] In some embodiments, a non-cationic lipid is a neutral lipid, i.e., a lipid that does not carry a net charge in the conditions under which the pharmaceutical composition is formulated and/or administered.

[0290] In some embodiments, such non-cationic lipids may be used alone, but are preferably used in combination with other lipids, for example, cationic lipids.

[0291] In some embodiments, a non-cationic lipid may be present in a molar ratio (mol %) of about 5% to about 90%, about 5% to about 70%, about 5% to about 50%, about 5% to about 40%, about 5% to about 30%, about 10% to about 70%, about 10% to about 50%, or about 10% to about 40% of the total lipids present in a pharmaceutical composition. In some embodiments, total non-cationic lipids may be present in a molar ratio (mol %) of about 5% to about 90%, about 5% to about 70%, about 5% to about 50%, about 5% to about 40%, about 5% to about 30%, about 10% to about 70%, about 10% to about 50%, or about 10% to about 40% of the total lipids present in a pharmaceutical composition. In some embodiments, the percentage of non-cationic lipid in a lipid nanoparticle may be greater than about 5 mol %, greater than about 10 mol %, greater than about 20 mol %, greater than about 30 mol %, or greater than about 40 mol %. In some embodiments, the percentage total non-cationic lipids in a lipid nanoparticle may be greater than about 5 mol %, greater than about 10 mol %, greater than about 20 mol %, greater than about 30 mol %, or greater than about 40 mol %. In some embodiments, the percentage of non-cationic lipid in a lipid nanoparticle is no more than about 5 mol %, no more than about 10 mol %, no more than about 20 mol %, no more than about 30 mol %, or no more than about 40 mol %. In some embodiments, the percentage total non-cationic lipids in a lipid nanoparticle may be no more than about 5 mol %, no more than about 10 mol %, no more than about 20 mol %, no more than about 30 mol %, or no more than about 40 mol %.

[0292] In some embodiments, a non-cationic lipid may be present in a weight ratio (wt %) of about 5% to about 90%, about 5% to about 70%, about 5% to about 50%, about 5% to about 40%, about 5% to about 30%, about 10% to about 70%, about 10% to about 50%, or about 10% to about 40% of the total lipids present in a pharmaceutical composition. In some embodiments, total non-cationic lipids may be present in a weight ratio (wt %) of about 5% to about 90%, about 5% to about 70%, about 5% to about 50%, about 5% to about 40%, about 5% to about 30%, about 10% to about 70%, about 10% to about 50%, or about 10% to about 40% of the total lipids present in a pharmaceutical composition. In some embodiments, the percentage of non-cationic lipid in a lipid nanoparticle may be greater than about 5 wt %, greater than about 10 wt %, greater than about 20 wt %, greater than about 30 wt %, or greater than about 40 wt %. In some embodiments, the percentage total non-cationic lipids in a lipid nanoparticle may be greater than about 5 wt %, greater than about 10 wt %, greater than about 20 wt %, greater than about 30 wt %, or greater than about 40 wt %. In some embodiments, the percentage of non-cationic lipid in a lipid nanoparticle is no more than about 5 wt %, no more than about 10 wt %, no more than about 20 wt %, no more than about 30 wt %, or no more than about 40 wt %. In some embodiments, the percentage total non-cationic lipids in a lipid nanoparticle may be no more than about 5 wt %, no more than about 10 wt %, no more than about 20 wt %, no more than about 30 wt %, or no more than about 40 wt %.

Cholesterol-Based Lipids In some embodiments, the lipid nanoparticles comprise one or more cholesterol-based lipids. For example, suitable cholesterol-based cationic lipids include, for example, DC-Choi (N,N-dimethyl-N-ethylcarboxamidocholesterol), 1,4-bis(3-N-oleylamino-propyl) piperazine (Gao, et al. Biochem. Biophys. Res. Comm. 179, 280 (1991); Wolf et al. BioTechniques 23, 139 (1997); U.S. Pat. No. 5,744,335), or imidazole cholesterol ester (ICE), as disclosed in International Patent Publication WO 2011/068810, which has the following structure:

[chemical structure]

[0293] In embodiments, a cholesterol-based lipid is cholesterol.

[0294] In some embodiments, the cholesterol-based lipid may comprise a molar ratio (mol %) of about 1% to about 30%, or about 5% to about 20% of the total lipids present in a lipid nanoparticle. In some embodiments, the percentage of cholesterol-based lipid in the lipid nanoparticle may be greater than about 5 mol %, greater than about 10 mol %, greater than about 20 mol %, greater than about 30 mol %, or greater than about 40 mol %. In some embodiments, the percentage of cholesterol-based lipid in the lipid nanoparticle may be no more than about 5 mol %, no more than about 10 mol %, no more than about 20 mol %, no more than about 30 mol %, or no more than about 40 mol %.

[0295] In some embodiments, a cholesterol-based lipid may be present in a weight ratio (wt %) of about 1% to about 30%, or about 5% to about 20% of the total lipids present in a lipid nanoparticle. In some embodiments, the percentage of cholesterol-based lipid in the lipid nanoparticle may be greater than about 5 wt %, greater than about 10 wt %, greater than about 20 wt %, greater than about 30 wt %, or greater than about 40 wt %. In some embodiments, the percentage of cholesterol-based lipid in the lipid nanoparticle may be no more than about 5 wt %, no more than about 10 wt %, no more than about 20 wt %, no more than about 30 wt %, or no more than about 40 wt %.

### PEG-Modified Lipids

[0296] In some embodiments, the lipid nanoparticle comprises one or more PEGylated lipids.

[0297] For example, the use of polyethylene glycol (PEG)-modified phospholipids and derivatized lipids such as derivatized ceramides (PEG-CER), including N-Octanoyl-Sphingosine-1-[Succinyl(Methoxy Polyethylene Glycol)-2000] (C8 PEG-2000 ceramide) is also contemplated by the present invention, either alone or preferably in combination with other lipid pharmaceutical compositions together which comprise the transfer vehicle (e.g., a lipid nanoparticle).

[0298] Contemplated PEG-modified lipids include, but are not limited to, a polyethylene glycol chain of up to 5 kDa in length covalently attached to a lipid with alkyl chain(s) of C6-C20 length. In some embodiments, a PEG-modified or PEGylated lipid is PEGylated cholesterol or PEG-2K. The addition of such components may prevent complex aggregation and may also provide a means for increasing circulation lifetime and increasing the delivery of the lipid-nucleic acid pharmaceutical composition to the target tissues, (Klibanov et al. (1990) FEBS Letters, 268 (1): 235-237), or they may be selected to rapidly exchange out of the pharmaceutical composition in vivo (see U.S. Pat. No. 5,885,613). Particularly useful exchangeable lipids are PEG-ceramides having shorter acyl chains (e.g., C14 or C18). Lipid nanoparticles suitable for use with the invention typically include a PEG-modified lipid such as 1,2-dimyristoyl-rac-glycero-3-methoxypolyethylene glycol-2000 (DMG-PEG2K).

[0299] The PEG-modified phospholipid and derivatized lipids of the present invention may comprise a molar ratio from about 0% to about 20%, about 0.5% to about 20%, about 1% to about 15%, about 4% to about 10%, or about 2% of the total lipid present in the liposomal transfer vehicle (e.g., a lipid nanoparticle disclosed herein). In some embodiments, one or more PEG-modified lipids constitute about 4% of the total lipids by molar ratio. In some embodiments, one or more PEG-modified lipids constitute about 5% of the total lipids by molar ratio. In some embodiments, one or more PEG-modified lipids constitute about 6% of the total lipids by molar ratio. For certain applications, such as pulmonary delivery, lipid nanoparticles in which the PEG-modified lipid component constitutes about 5% of the total lipids by molar ratio have been found to be particularly suitable.

### Ratio of Distinct Lipid Components

[0300] A suitable lipid nanoparticle for the present invention may include one or more of any of the cationic lipids, non-cationic lipids, cholesterol lipids, PEG-modified lipids, amphiphilic block copolymers and/or polymers described herein at various ratios. In some embodiments, a lipid nanoparticle comprises five and no more than five distinct components of nanoparticle. In some embodiments, a lipid nanoparticle comprises four and no more than four distinct components of nanoparticle. In some embodiments, a lipid nanoparticle comprises three and no more than three distinct components of nanoparticle. As non-limiting examples, a suitable lipid nanoparticle pharmaceutical composition may include a combination selected from cKK-E12, DOPE, cholesterol and DMG-PEG2K; C12-200, DOPE, cholesterol and DMG-PEG2K; HGT4003, DOPE, cholesterol and DMG-PEG2K; ICE, DOPE, cholesterol and DMG-PEG2K; HGT4001, DOPE, cholesterol and DMG-PEG2K; HGT4002, DOPE, cholesterol and DMG-PEG2K; TL1-01D-DMA, DOPE, cholesterol and DMG-PEG2K; TL1-04D-DMA, DOPE, cholesterol and DMG-PEG2K; TL1-08D-DMA, DOPE, cholesterol and DMG-PEG2K; TL1-10D-DMA, DOPE, cholesterol and DMG-PEG2K; ICE, DOPE and DMG-PEG2K; HGT4001, DOPE and DMG-PEG2K; or HGT4002, DOPE and DMG-PEG2K.

[0301] In various embodiments, cationic lipids (e.g., cKK-E12, C12-200, TL1-01D-DMA, TL1-04D-DMA, TL1-08D-DMA, TL1-10D-DMA, ICE, HGT4001, HGT4002 and/or HGT4003) constitute about 30-60% (e.g., about 30-55%, about 30-50%, about 30-45%, about 30-40%, about 35-50%, about 35-45%, or about 35-40%) of the lipid nanoparticle by molar ratio. In some embodiments, the percentage of cationic lipids (e.g., cKK-E12, C12-200, TL1-01D-DMA, TL1-04D-DMA, TL1-08D-DMA, TL1-10D-DMA, ICE, HGT4001, HGT4002 and/or HGT4003) is or greater than about 30%, about 35%, about 40%, about 45%, about 50%, about 55%, or about 60% of the lipid nanoparticle by molar ratio.

[0302] In some embodiments, the molar ratio of cationic lipid(s) to non-cationic lipid(s) to cholesterol-based lipid(s) to PEG-modified lipid(s) may be between about 30-60:25-35:20-30:1-15, respectively. In some embodiments, the ratio of cationic lipid(s) to non-cationic lipid(s) to cholesterol-based lipid(s) to PEG-modified lipid(s) is approximately 40:30:20:10, respectively. In some embodiments, the ratio of cationic lipid(s) to non-cationic lipid(s) to cholesterol-based lipid(s) to PEG-modified lipid(s) is approximately 40:30:25:5, respectively. In some embodiments, the ratio of cationic lipid(s) to non-cationic lipid(s) to cholesterol-based lipid(s) to PEG-modified lipid(s) is approximately 40:32:25:3, respectively. In some embodiments, the ratio of cationic lipid(s) to non-cationic lipid(s) to cholesterol-based lipid(s) to PEG-modified lipid(s) is approximately 50:25:20:5.

[0303] In embodiments where a lipid nanoparticle comprises three and no more than three distinct components of lipids, the ratio of total lipid content (i.e., the ratio of lipid component (1):lipid component (2):lipid component (3)) can be represented as x:y:z, wherein

$$( y + z ) = 100 - x .$$

[0304] In some embodiments, each of “x,” “y,” and “z” represents molar percentages of the three distinct components of lipids, and the ratio is a molar ratio.

[0305] In some embodiments, each of “x,” “y,” and “z” represents weight percentages of the three distinct components of lipids, and the ratio is a weight ratio.

[0306] In some embodiments, lipid component (1), represented by variable “x,” is a sterol-based cationic lipid.

[0307] In some embodiments, lipid component (2), represented by variable “y,” is a non-cationic lipid.

[0308] In some embodiments, lipid component (3), represented by variable “z” is a PEG lipid.

[0309] In some embodiments, variable “x,” representing the molar percentage of lipid component (1) (e.g., a sterol-based cationic lipid), is at least about 10%, about 20%, about 30%, about 40%, about 50%, about 55%, about 60%, about 65%, about 70%, about 75%, about 80%, about 85%, about 90%, or about 95%.

[0310] In some embodiments, variable “x,” representing the molar percentage of lipid component (1) (e.g., a sterol-based cationic lipid), is no more than about 95%, about 90%, about 85%, about 80%, about 75%, about 70%, about 65%, about 60%, about 55%, about 50%, about 40%, about 30%, about 20%, or about 10%. In embodiments, variable “x” is no more than about 65%, about 60%, about 55%, about 50%, about 40%.

[0311] In some embodiments, variable “x,” representing the molar percentage of lipid component (1) (e.g., a sterol-based cationic lipid), is: at least about 50% but less than about 95%; at least about 50% but less than about 90%; at least about 50% but less than about 85%; at least about 50% but less than about 80%; at least about 50% but less than about 75%; at least about 50% but less than about 70%; at least about 50% but less than about 65%; or at least about 50% but less than about 60%. In embodiments, variable “x” is at least about 50% but less than about 70%; at least about 50% but less than about 65%; or at least about 50% but less than about 60%.

[0312] In some embodiments, variable “x,” representing the weight percentage of lipid component (1) (e.g., a sterol-based cationic lipid), is at least about 10%, about 20%, about 30%, about 40%, about 50%, about 55%, about 60%, about 65%, about 70%, about 75%, about 80%, about 85%, about 90%, or about 95%.

[0313] In some embodiments, variable “x,” representing the weight percentage of lipid component (1) (e.g., a sterol-based cationic lipid), is no more than about 95%, about 90%, about 85%, about 80%, about 75%, about 70%, about 65%, about 60%, about 55%, about 50%, about 40%, about 30%, about 20%, or about 10%. In embodiments, variable “x” is no more than about 65%, about 60%, about 55%, about 50%, about 40%.

[0314] In some embodiments, variable “x,” representing the weight percentage of lipid component (1) (e.g., a sterol-based cationic lipid), is: at least about 50% but less than about 95%; at least about 50% but less than about 90%; at least about 50% but less than about 85%; at least about 50% but less than about 80%; at least about 50% but less than about 75%; at least about 50% but less than about 70%; at least about 50% but less than about 65%; or at least about 50% but less than about 60%. In embodiments, variable “x” is at least about 50% but less than about 70%; at least about 50% but less than about 65%; or at least about 50% but less than about 60%.

[0315] In some embodiments, variable “z,” representing the molar percentage of lipid component (3) (e.g., a PEG lipid) is no more than about 1%, 2%, 3%, 4%, 5%, 6%, 7%, 8%, 9%, 10%, 15%, 20%, or 25%. In embodiments, variable “z,” representing the molar percentage of lipid component (3) (e.g., a PEG lipid) is about 1%, 2%, 3%, 4%, 5%, 6%, 7%, 8%, 9%, 10%. In embodiments, variable “z,” representing the molar percentage of lipid component (3) (e.g., a PEG lipid) is about 1% to about 10%, about 2% to about 10%, about 3% to about 10%, about 4% to about 10%, about 1% to about 7.5%, about 2.5% to about 10%, about 2.5% to about 7.5%, about 2.5% to about 5%, about 5% to about 7.5%, or about 5% to about 10%.

[0316] In some embodiments, variable “z,” representing the weight percentage of lipid component (3) (e.g., a PEG lipid) is no more than about 1%, 2%, 3%, 4%, 5%, 6%, 7%, 8%, 9%, 10%, 15%, 20%, or 25%. In embodiments, variable “z,” representing the weight percentage of lipid component (3) (e.g., a PEG lipid) is about 1%, 2%, 3%, 4%, 5%, 6%, 7%, 8%, 9%, 10%. In embodiments, variable “z,” representing the weight percentage of lipid component (3) (e.g., a PEG lipid) is about 1% to about 10%, about 2% to about 10%, about 3% to about 10%, about 4% to about 10%, about 1% to about 7.5%, about 2.5% to about 10%, about 2.5% to about 7.5%, about 2.5% to about 5%, about 5% to about 7.5%, or about 5% to about 10%.

[0317] For pharmaceutical compositions having three and only three distinct lipid components, variables “x,” “y,” and “z” may be in any combination so long as the total of the three variables sums to 100% of the total lipid content. For example, in typical three-component lipid nanoparticles suitable for use with the invention, the molar ratio of cationic lipid to non-cationic lipid to PEG-modified lipid may be between about 55-65:30-40:1-15, respectively. In some embodiments, a molar ratio of cationic lipid (e.g., a sterol-based lipid) to non-cationic lipid (e.g., DOPE or DEPE) to PEG-modified lipid (e.g., DMG-PEG2K) of 60:35:5 is particularly suitable, e.g., for pulmonary delivery of lipid nanoparticles via nebulization.

### Exemplary Lipid Nanoparticle Formulation

[0318] An exemplary lipid nanoparticle for in vivo delivery of a nucleic acids in accordance with the present invention comprises a cationic lipid (e.g., cKK-E10), a non-cationic lipid (e.g., DOPE), cholesterol and a PEG-modified lipid (e.g., DMG-PEG2K). In a particular embodiment, the invention provides a lipid nanoparticle for the delivery of the nucleic acids of the invention, which has a lipid component consisting of cKK-E10, DOPE, cholesterol and DMG-PEG2K at the molar ratios 40:30:28.5:1.5. As shown in the examples, this lipid nanoparticle formulation has been found to be particularly effective for use in the immunogenic compositions of the invention, in particular for intramuscular administration of lipid nanoparticles comprising the nucleic acids of the invention.

### Lipid Nanoparticle Compositions Containing at Least Two Nucleic Acids

[0319] In some embodiments, at least two nucleic acids comprising different optimized nucleotide sequences of the invention are encapsulated in the same lipid nanoparticle (e.g., a lipid nanoparticle comprising cKK-E10, DOPE, cholesterol and DMG-PEG2K). For example, a first nucleic acid (e.g., an mRNA) comprising a first optimized nucleotide sequence of the invention may be combined with a second nucleic acid (e.g., an mRNA) comprising a second optimized nucleotide sequence of the invention and encapsulated in the same lipid nanoparticle.

[0320] In other embodiments, at least two nucleic acids comprising different optimized nucleotide sequences of the invention are encapsulated separately (typically using a lipid nanoparticle formulation having the same lipid composition, e.g., cKK-E10, DOPE, cholesterol and DMG-PEG2K). For example, a first nucleic acid (e.g., an mRNA) comprising a first optimized nucleotide sequence of the invention and a second nucleic acid (e.g., an mRNA) comprising a second optimized nucleotide sequence of the invention may each be encapsulated in separate lipid nanoparticles, which are then combined to provide a mixture of lipid nanoparticles encapsulating the first nucleic acid and lipid nanoparticles encapsulating the second nucleic acid (typically at a 1:1 ratio).

[0321] For instance, an immunogenic composition in accordance with the invention may comprise at least two nucleic acids, wherein the first nucleic acid comprises an optimized nucleotide sequence encoding a full-length SARS-COV-2 spike protein which has been modified relative to naturally occurring full-length SARS-COV-2 spike protein of SEQ ID NO: 1 to remove the furin cleavage site and to mutate residues 986 and 987 to proline (e.g., an mRNA comprising the optimized nucleotide sequence of SEQ ID NO: 44, or the exemplary mRNA construct 1 shown in Table 4); and the second nucleic acid comprises an optimized nucleotide sequence encoding a full-length SARS-COV-2 spike protein which has been modified relative to naturally occurring full-length SARS-COV-2 spike protein of SEQ ID NO: 1 to remove the furin cleavage site and to mutate residues 986 and 987 to proline and further contains the L18F, D80A, D215G, L242-, A243-, L244-, K417N, E484K, N501Y, D614G and A701V mutations (e.g., an mRNA comprising the optimized nucleotide sequence of SEQ ID NO: 166, or the exemplary mRNA construct 2 shown in Table 4). In some embodiments, the first nucleic acid may be combined with the second nucleic acid and encapsulated in the same lipid nanoparticle. In other embodiments, the first nucleic acid and the second nucleic acid may each be encapsulated in separate lipid nanoparticles (typically formed from the same lipid components, e.g., cKK-E10, DOPE, cholesterol and DMG-PEG2K). The lipid nanoparticles encapsulating the first nucleic acid and the lipid nanoparticles encapsulating the second nucleic acid are then combined (typically at a 1:1 ratio).

### Pharmaceutical Compositions

[0322] A nucleic acid comprising an optimized nucleotide sequence encoding a SARS-COV-2 antigen in accordance with the invention may be provided in a pharmaceutical composition (e.g., an immunogenic composition or a vaccine). In a typical embodiment, a pharmaceutical composition in accordance with the invention comprises a nucleic acid in accordance with the invention and a lipid nanoparticle. In particular embodiments, the nucleic acid is encapsulated in the lipid nanoparticle. In some embodiments, the lipid nanoparticle may comprise one or more of a cationic lipid, a non-cationic lipid, a cholesterol-based lipid, a PEG-modified lipid, or a combination thereof. In a typical embodiment, the lipid nanoparticle comprises a cationic lipid, a non-cationic lipid, a cholesterol-based lipid, and a PEG-modified lipid. In some embodiments, the lipid nanoparticle comprises a cationic lipid, a non-cationic lipid, and a PEG-modified lipid.

### Pharmaceutically Acceptable Excipients

[0323] To stabilize the nucleic acid and/or lipid nanoparticle, or to facilitate administration of the pharmaceutical composition and/or enhance in vivo expression of the nucleic acids of the invention, the nucleic acid and/or lipid nanoparticle can be formulated in combination with one or more additional nucleic acids, carriers, targeting ligands, stabilizing reagents, and/or other pharmaceutically acceptable excipients. Techniques for formulation and administration of drugs may be found in “Remington's Pharmaceutical Sciences,” Mack Publishing Co., Easton, Pa., latest edition.

[0324] In some embodiments, the pharmaceuticals composition is formulated with a diluent. In some embodiments, the diluent is selected from a group consisting of DMSO, ethylene glycol, glycerol, 2-Methyl-2,4-pentanediol (MPD), propylene glycol, sucrose, and trehalose. In some embodiments, the formulation comprises 1%, 2%, 3%, 4%, 5%, 6%, 7%, 8%, 9%, 10%, 11%, 12%, 13%, 14%, 15%, 16%, 17%, 18%, 19% or 20% diluent. In a particular embodiment, the mRNA is formulated in 10% trehalose as the diluent.

### Therapeutically Effective Amount

[0325] The nucleic acid in accordance with the invention is provided in a therapeutically effective amount in the pharmaceutical compositions provided here. As used herein, the term “therapeutically effective amount” is largely determined based on the total amount of the therapeutic agent contained in the pharmaceutical compositions of the present invention. Generally, a therapeutically effective amount is sufficient to achieve a meaningful benefit to the subject (e.g., treating or preventing an infection with a SARS-COV-2 infection). For example, a therapeutically effective amount may be an amount sufficient to achieve a desired prophylactic effect with an immunogenic composition of the invention.

[0326] In some embodiments, a pharmaceutical composition (e.g., an immunogenic composition) in accordance with the present invention comprises an mRNA comprising an optimized nucleotide sequence encoding a SARS-COV-2 antigen at a concentration ranging from 0.1 mg/mL to 10.0 mg/mL. In some embodiments, the mRNA is at a concentration of at least 0.1 mg/mL. In some embodiments, the mRNA is at a concentration of at least 0.2 mg/mL. In some embodiments, the mRNA is at a concentration of at least 0.3 mg/mL. In some embodiments, the mRNA is at a concentration of at least 0.4 mg/mL. In some embodiments, the mRNA is at a concentration of at least 0.5 mg/mL. In some embodiments, the mRNA is at a concentration of at least 0.6 mg/mL. In some embodiments, the mRNA is at a concentration of at least 0.7 mg/mL. In some embodiments, the mRNA is at a concentration of at least 0.8 mg/mL. In some embodiments, the mRNA is at a concentration of at least 0.9 mg/mL. In some embodiments, the mRNA is at a concentration of at least 1.0 mg/mL. In a typical embodiment, the mRNA is at a concentration of about 0.5 mg/mL to about 1.0 mg/mL, e.g., about 0.6 mg/mL to about 0.8 mg/mL.

[0327] In some embodiments, a pharmaceutical composition (e.g., an immunogenic composition) in accordance with the present invention comprises an mRNA comprising an optimized nucleotide sequence encoding a SARS-COV-2 antigen at a dose of between 5 μg and 200 μg. In some embodiments, the mRNA dose in the pharmaceutical composition is 10 μg and 200 μg. In some embodiments, the mRNA dose in the pharmaceutical composition is between 7 μg and 135 μg. In particular embodiments, the mRNA dose in the pharmaceutical composition is between 15 μg and 135 μg (e.g., between 15 μg and 45 μg).

[0328] In some embodiments, the mRNA dose in the pharmaceutical composition is at least 5 μg. In some embodiments, the mRNA dose in the pharmaceutical composition is at least 10 μg. In some embodiments, the mRNA dose in the pharmaceutical composition is at least 15 μg. In some embodiments, the mRNA dose in the pharmaceutical composition is at least 20 μg. In some embodiments, the mRNA dose in the pharmaceutical composition is at least 25 μg. In some embodiments, the mRNA dose in the pharmaceutical composition is at least 30 μg. In some embodiments, the mRNA dose in the pharmaceutical composition is at least 35 μg. In some embodiments, the mRNA dose in the pharmaceutical composition is at least 40 μg. In some embodiments, the mRNA dose in the pharmaceutical composition is at least 45 μg. In some embodiments, the mRNA dose in the pharmaceutical composition is at least 50 μg. In some embodiments, the mRNA dose in the pharmaceutical composition is at least 75 μg. In some embodiments, the mRNA dose in the pharmaceutical composition is at least 100 μg. In some embodiments, the mRNA dose in the pharmaceutical composition is at least 150 μg.

[0329] In a specific embodiment, the mRNA dose in the pharmaceutical composition is about 7.5 μg. In another specific embodiment, the mRNA dose in the pharmaceutical composition is about 10 μg. In another specific embodiment, the mRNA dose in the pharmaceutical composition is about 15 μg. In another specific embodiment, the mRNA dose in the pharmaceutical composition is about 20 μg. In another specific embodiment, the mRNA dose in the pharmaceutical composition is about 30 μg. In another specific embodiment, the mRNA dose in the pharmaceutical composition is about 40 μg. In another specific embodiment, the mRNA dose in the pharmaceutical composition is about 45 μg. In another specific embodiment, the mRNA dose in the pharmaceutical composition is about 135 μg.

[0330] In some embodiments, a pharmaceutical composition (e.g., an immunogenic composition) in accordance with the present invention comprises more than one mRNA construct (e.g., at least two mRNA constructs) comprising an optimized nucleotide sequence encoding a SARS-COV-2 antigen (e.g., two mRNA constructs encoding naturally occurring variants of the SARS-COV-2 S protein). Accordingly, in some embodiments, the total dose of the mRNA constructs is 5 μg and 200 μg. For example, the total dose of the mRNA constructs is between 10 μg and 200 μg. In some embodiments, the total dose of the mRNA constructs is between 7 μg and 135 μg. In particular embodiments, the total dose of the mRNA constructs is between 15 μg and 135 μg (e.g., between 15 μg and 45 μg).

[0331] In some embodiments, the total dose of the mRNA constructs is at least 5 μg. In some embodiments, the total dose of the mRNA constructs is at least 10 μg. In some embodiments, the total dose of the mRNA constructs is at least 15 μg. In some embodiments, the total dose of the mRNA constructs is at least 20 μg. In some embodiments, the total dose of the mRNA constructs is at least 25 μg. In some embodiments, the total dose of the mRNA constructs is at least 30 μg. In some embodiments, the total dose of the mRNA constructs is at least 35 μg. In some embodiments, the total dose of the mRNA constructs is at least 40 μg. In some embodiments, the total dose of the mRNA constructs is at least 45 μg. In some embodiments, the total dose of the mRNA constructs is at least 50 μg. In some embodiments, the total dose of the mRNA constructs is at least 75 μg. In some embodiments, the total dose of the mRNA constructs is at least 100 μg. In some embodiments, the total dose of the mRNA constructs is at least 150 μg.

[0332] In a specific embodiment, the total dose of the mRNA constructs in the pharmaceutical composition is about 7.5 μg. In another specific embodiment, the total dose of the mRNA constructs in the pharmaceutical composition is about 10 μg. In another specific embodiment, the total dose of the mRNA constructs in the pharmaceutical composition is about 15 μg. In another specific embodiment, the total dose of the mRNA constructs in the pharmaceutical composition is about 20 μg. In another specific embodiment, the total dose of the mRNA constructs in the pharmaceutical composition is about 30 μg. In another specific embodiment, the total dose of the mRNA constructs in the pharmaceutical composition is about 40 μg. In another specific embodiment, the total dose of the mRNA constructs in the pharmaceutical composition is about 45 μg. In another specific embodiment, the total dose of the mRNA constructs in the pharmaceutical composition is about 135 μg.

### Combinations of SARS-COV-2 S Proteins

[0333] In some embodiments, an immunogenic composition in accordance with the invention comprises more than one optimized nucleotide sequence encoding a SARS-COV-2 spike protein. In some embodiments, each of the optimized nucleotide sequences encodes a naturally occurring variant of a SARS-COV-2 spike protein. In some embodiments, one or more of these optimized nucleotide sequences encodes a SARS-COV-2 spike protein that has been modified relative to naturally occurring SARS-COV-2 spike protein. In particular embodiments, the modifications stabilize the SARS-COV-2 spike protein in its prefusion conformation, as described in detail above.

[0334] In some embodiments, an immunogenic composition in accordance with the present invention comprises at least two nucleic acids, for use in prophylaxis of an infection with SARS-CoV-2, wherein a first nucleic acid comprises an optimized nucleotide sequence which encodes an amino acid sequence comprising a sequence selected from SEQ ID NO: 1, 2, 3, 4, 5, 8, 9, 10, 11, 12, 14, 15, 16, 17, 19, 20, 35, 66, 68, 70, 72, 74, 76, 78, 80, 82, 84. 86, 88, 90, 92, 94, 96, 98, 104, 106, 108, 110, 118, 120, 123, 125, 127, 129, 131, 133, 135, 137, 139 or 141, and wherein one or more further nucleic acid(s) comprise(s) an optimized nucleotide sequence which encodes an amino acid sequence comprising a sequence selected from SEQ ID NO: 151, 153, 155, 157, 159, 161, 163, 165, 167, 169 or 171.

[0335] In some embodiments, an immunogenic composition in accordance with the present invention comprises at least two nucleic acids, for use in prophylaxis of an infection with SARS-CoV-2, wherein a first nucleic acid that encodes an amino acid sequence comprising SEQ ID NO: 11; and wherein a second nucleic acid comprises an optimized nucleotide sequence that encodes an amino acid sequence of SEQ ID NO: 157.

[0336] In some embodiments, an immunogenic composition in accordance with the present invention comprises at least two nucleic acids, for use in prophylaxis of an infection with SARS-CoV-2, wherein a first nucleic acid comprises an optimized nucleotide sequence that is at least 85% (e.g., at least 90%) identical to the nucleic acid sequence of SEQ ID NO: 44 and encodes an amino acid sequence comprising SEQ ID NO:11, optionally wherein the optimized nucleotide sequence has the nucleic acid sequence of SEQ ID NO: 44; and wherein a second nucleic acid comprises an optimized nucleotide sequence that is at least 85% (e.g., at least 90%) identical to the nucleic acid sequence of SEQ ID NO: 156 and encodes an amino acid sequence comprising SEQ ID NO: 157, optionally wherein the optimized nucleotide sequence has the nucleic acid sequence of SEQ ID NO 156.

[0337] In some embodiments, an immunogenic composition in accordance with the present invention comprises at least two nucleic acids, for use in prophylaxis of an infection with SARS-CoV-2, wherein a first nucleic acid that encodes an amino acid sequence comprising SEQ ID NO: 11; and wherein a second nucleic acid comprises an optimized nucleotide sequence that encodes an amino acid sequence of SEQ ID NO: 163.

[0338] In some embodiments, an immunogenic composition in accordance with the present invention comprises at least two nucleic acids, for use in prophylaxis of an infection with SARS-CoV-2, wherein a first nucleic acid comprises an optimized nucleotide sequence that is at least 85% (e.g., at least 90%) identical to the nucleic acid sequence of SEQ ID NO: 44 and encodes an amino acid sequence comprising SEQ ID NO:11, optionally wherein the optimized nucleotide sequence has the nucleic acid sequence of SEQ ID NO: 44; and wherein a second nucleic acid comprises an optimized nucleotide sequence that is at least 85% (e.g., at least 90%) identical to the nucleic acid sequence of SEQ ID NO: 162 and encodes an amino acid sequence comprising SEQ ID NO: 163, optionally wherein the optimized nucleotide sequence has the nucleic acid sequence of SEQ ID NO 162.

[0339] In some embodiments, an immunogenic composition in accordance with the present invention comprises at least two nucleic acids, for use in prophylaxis of an infection with SARS-CoV-2, wherein a first nucleic acid that encodes an amino acid sequence comprising SEQ ID NO: 11; and wherein a second nucleic acid comprises an optimized nucleotide sequence that encodes an amino acid sequence of SEQ ID NO: 167.

[0340] In some embodiments, an immunogenic composition in accordance with the present invention comprises at least two nucleic acids, for use in prophylaxis of an infection with SARS-CoV-2, wherein a first nucleic acid comprises an optimized nucleotide sequence that is at least 85% (e.g., at least 90%) identical to the nucleic acid sequence of SEQ ID NO: 44 and encodes an amino acid sequence comprising SEQ ID NO:11, optionally wherein the optimized nucleotide sequence has the nucleic acid sequence of SEQ ID NO: 44; and wherein a second nucleic acid comprises an optimized nucleotide sequence that is at least 85% (e.g., at least 90%) identical to the nucleic acid sequence of SEQ ID NO: 166 and encodes an amino acid sequence comprising SEQ ID NO: 167, optionally wherein the optimized nucleotide sequence has the nucleic acid sequence of SEQ ID NO 166.

[0341] In some embodiments, an immunogenic composition in accordance with the present invention comprises at least two nucleic acids, for use in prophylaxis of an infection with SARS-CoV-2, wherein a first nucleic acid that encodes an amino acid sequence comprising SEQ ID NO: 11; and wherein a second nucleic acid comprises an optimized nucleotide sequence that encodes an amino acid sequence of SEQ ID NO: 171.

[0342] In some embodiments, an immunogenic composition in accordance with the present invention comprises at least two nucleic acids, for use in prophylaxis of an infection with SARS-CoV-2, wherein a first nucleic acid comprises an optimized nucleotide sequence that is at least 85% (e.g., at least 90%) identical to the nucleic acid sequence of SEQ ID NO: 44 and encodes an amino acid sequence comprising SEQ ID NO:11, optionally wherein the optimized nucleotide sequence has the nucleic acid sequence of SEQ ID NO: 44; and wherein a second nucleic acid comprises an optimized nucleotide sequence that is at least 85% (e.g., at least 90%) identical to the nucleic acid sequence of SEQ ID NO: 170 and encodes an amino acid sequence comprising SEQ ID NO: 171, optionally wherein the optimized nucleotide sequence has the nucleic acid sequence of SEQ ID NO 170.

[0343] In some embodiments, an immunogenic composition in accordance with the present invention comprises at least three, at least four or at least five nucleic acids, for use in prophylaxis of an infection with SARS-COV-2. The first, second, third, fourth and fifth nucleic acids, as applicable, may be encapsulated in the same lipid nanoparticles. Alternatively, the first, second, third, fourth and fifth nucleic acids, as applicable, may be encapsulated in separate lipid nanoparticles which are mixed together to form a pharmaceutical composition in accordance with the present invention.

### Combinations of SARS-COV-2 Antigens

[0344] In some embodiments, a pharmaceutical composition in accordance with the invention comprises more than one optimized nucleotide sequence encoding a SARS-COV-2 antigen. In some embodiments, a pharmaceutical composition may comprise a first nucleic acid comprising an optimized nucleotide sequence encoding a SARS-COV-2 S protein or an antigenic fragment thereof and a second nucleic acid comprising an optimized nucleotide sequence encoding a SARS-CoV-2 M protein or an antigenic fragment thereof. In some embodiments, a pharmaceutical composition may comprise a first nucleic acid comprising an optimized nucleotide sequence encoding a SARS-COV-2 S protein or an antigenic fragment thereof and a second nucleic acid comprising an optimized nucleotide sequence encoding a SARS-COV-2 N protein or an antigenic fragment thereof. In some embodiments, a pharmaceutical composition may comprise a first nucleic acid comprising an optimized nucleotide sequence encoding a SARS-COV-2 S protein or an antigenic fragment thereof and a second nucleic acid comprising an optimized nucleotide sequence encoding a SARS-COV-2 E protein or an antigenic fragment thereof. In other embodiments, a pharmaceutical composition may comprise a first nucleic acid comprising an optimized nucleotide sequence encoding a SARS-COV-2 S protein or an antigenic fragment thereof and second, third and/or fourth nucleic acids, wherein said second nucleic acid comprises an optimized nucleotide sequence encoding a SARS-COV-2 M protein or an antigenic fragment thereof, wherein said third nucleic acid comprises an optimized nucleotide sequence encoding a SARS-COV-2 N protein or an antigenic fragment thereof, and wherein said fourth nucleic acid comprises an optimized nucleotide sequence encoding a SARS-COV-2 E protein or an antigenic fragment thereof.

[0345] The first, second, third and fourth nucleic acids, as applicable, may be encapsulated in the same lipid nanoparticles. Alternatively, the first, second, third and fourth nucleic acids, as applicable, may be encapsulated in separate lipid nanoparticles which are mixed together to form a pharmaceutical composition in accordance with the present invention.

### Administration

[0346] Typically, a pharmaceutical composition in accordance with the invention (e.g., an immunogenic composition or a vaccine) is administered parenterally, e.g., by an intravenous, intradermal, subcutaneous, or intramuscular route. Most commonly the administration is intramuscular. Administration may be by injection, e.g., by needle-free and/or needle injection.

[0347] For example, using lipid nanoparticles containing the cationic lipid OF-Deg-Lin, Fenton et al. (Adv Mater. 2017; 29 (33)) were able to deliver encapsulated mRNA successfully to the spleen via intravenous injection. They observed that more than 85% of total protein production occurred in the spleen. When they analyzed the spleen of test animals, they found that lipid nanoparticles delivered the encapsulated mRNA primarily to B cell and monocyte/macrophage populations. A small percentage of the mRNA also appeared to be delivered to the neutrophil and T cell populations. As shown in the examples of the present specification, pharmaceutical compositions comprising lipid nanoparticles which have a lipid component consisting of cKK-E10, DOPE, cholesterol and DMG-PEG2K at the molar ratios 40:30:28.5:1.5 are especially effective in eliciting an immune response against the encapsulated nucleic acid(s), in particular when administered intramuscularly.

### Prime-Boost Immunization

[0348] In some embodiments, a pharmaceutical composition in accordance with the invention is administered once. In some embodiments, a pharmaceutical composition in accordance with the invention is administered at least twice.

[0349] For example, a typical prime-boost immunization of a subject who has not previously been immunized against an infection with a β-coronavirus, e.g., SARS-COV-2, typically comprises at least two immunizations. Commonly, these two immunization are administered at an interval. Accordingly, in some embodiments, a pharmaceutical composition in accordance with the invention is administered at least twice (e.g., three times) at an interval of 2, 3, 4, 5, 6, 7 or 8 weeks. In some embodiments, a pharmaceutical composition in accordance with the invention is administered twice at an interval of 2, 3, 4, 5, 6, 7, 8, 9, 10, 11 or 12 weeks. In typical embodiments, the administration interval is 2 weeks or 4 weeks (e.g., 1 month). In other embodiments, the administration interval is 11 weeks, or 12 weeks (e.g. about 3 months). Accordingly, in one embodiment, the invention provides a method of preventing an infection caused by a β-coronavirus (e.g., SARS-COV-2), wherein said method comprises administering to a subject a first dose of an immunogenic composition comprising an mRNA construct of the invention, and a second dose of an immunogenic composition of the invention, wherein said first and second doses are administered at least 2 weeks apart from each other. In some embodiments, the invention provides a method of preventing an infection caused by a β-coronavirus (e.g., SARS-CoV-2), wherein said method comprises administering to a subject a first dose of an immunogenic composition comprising an mRNA construct of the invention, and a second dose of an immunogenic composition of the invention, wherein said first and second doses are administered about 3 weeks apart from each other.

[0350] Sometimes, an initial prime-boost immunization is followed by at least one further immunization to refresh the protective effective of the initial immunization series. This further immunization typically takes place several months, and sometimes several years, after the initial prime-boost immunization. Accordingly, in some embodiments, a pharmaceutical composition in accordance with the invention is administered to a subject at least once 3-18 months (e.g., about 9 months or about 12 months) after the subject was administered with at least one dose of an immunogenic composition for the prophylaxis of an infection with a β-coronavirus, e.g. a β-coronavirus expressing a spike protein which binds to angiotensin-converting enzyme 2 (ACE2), such as SARS-COV-2. For example, a subject may have received at least one dose of an immunogenic composition for the prophylaxis of an infection with a β-coronavirus (e.g., SARS-CoV-2), and 3-18 months (e.g., about 9 months or about 12 months) later, the subject is administered a pharmaceutical composition of the invention. More typically, a subject may have received two doses of an immunogenic composition for the prophylaxis of an infection with a β-coronavirus (e.g., SARS-COV-2), e.g. a first dose and, at least two weeks later, a second dose. 3-18 months after having received the second dose, the subject may be administered with a pharmaceutical composition of the invention. The administration of a pharmaceutical composition of the invention may commonly occur at least 9 months (e.g., about 12 months) after the subject has received the second dose of an immunogenic composition for the prophylaxis of an infection with a β-coronavirus (e.g., SARS-COV-2).

[0351] In some embodiments, the first and second doses may be an immunogenic composition for the prophylaxis of an infection with a β-coronavirus (e.g., SARS-COV-2), e.g., a vaccine that elicits neutralizing antibodies against the S protein of the SARS-COV-2 index strain from Wuhan (SEQ ID NO: 1). For example, the vaccine may comprise a nucleic acid encoding a full-length SARS-COV-2 spike protein which has been modified relative to naturally occurring full-length SARS-COV-2 spike protein of SEQ ID NO: 1 to mutate residues 986 and 987 to proline to stabilize the full-length SARS-COV-2 spike protein in its prefusion conformation. Vaccines that elicit neutralizing antibodies include a pharmaceutical compositions disclosed herein (e.g., an immunogenic composition or a vaccine disclosed herein) as well as COVID-19 vaccines produced by Moderna (COVID-19 Vaccine Moderna, such as for example, mRNA-1273 or mRNA-1283), CureVac (CVnCOV), Johnson & Johnson (COVID-19 Vaccine Janssen), AstraZeneca (Vaxzevria), Pfizer/BioNTech (Comirnaty), Sputnik (Gam-COVID-Vac), Sinovac (COVID-19 Vaccine (Vero Cell) Inactivated) and Novavax (NVX-CoV2373). The first dose and the second dose may comprise the same vaccine. The first dose and the second dose may comprise different vaccines.

[0352] In a particular embodiment, the pharmaceutical composition of the invention which is administered 3-18 months later comprises a nucleic acid (e.g., an mRNA) comprising an optimized nucleotide sequence encoding a full-length SARS-COV-2 spike protein which has been modified relative to naturally occurring full-length SARS-COV-2 spike protein of SEQ ID NO: 1 to remove the furin cleavage site and to mutate residues 986 and 987 to proline and further contains the L18F, D80A, D215G, L242-, A243-, L244-, K417N, E484K, N501Y, D614G and A701V mutations. In a particular embodiment, the nucleic acid (e.g., an mRNA) comprising the optimized nucleotide sequence is capable of eliciting a broadly neutralizing antibody response against naturally occurring variants of SARS-COV-2, including the Wuhan index strain as well as variants observed in South Africa, Japan, Brazil, the UK, India and California. In some embodiments, the nucleic acid (e.g., an mRNA) comprising the optimized nucleotide sequence is capable of eliciting a neutralizing antibody response against SARS-COV-1. In a specific embodiment, the nucleic acid (e.g., an mRNA) comprising the optimized nucleotide sequence is capable of eliciting a neutralizing antibody response to a β-coronavirus expressing a spike protein which binds to angiotensin-converting enzyme 2 (ACE2). In some embodiments, the spike protein is at least 75% (e.g., at least 80%, 90%, 95% or 99%) identical to SEQ ID NO: 1. In a specific embodiment, the nucleic acid (e.g., the mRNA) comprises an optimized nucleotide sequence that encodes an amino acid sequence comprising SEQ ID NO: 167, optionally wherein the optimized nucleotide sequence has the nucleic acid sequence of SEQ ID NO: 166. For example, the optimized nucleotide sequence of the mRNA may have the nucleic acid sequence of SEQ ID NO: 173.

[0353] In one specific embodiment, the pharmaceutical composition of the invention which is administered 3-18 months later comprises at least two nucleic acids (e.g., a first mRNA and a second mRNA), wherein the first nucleic acid (e.g., the first mRNA) comprises an optimized nucleotide sequence encoding a full-length SARS-COV-2 spike protein which has been modified relative to naturally occurring full-length SARS-COV-2 spike protein of SEQ ID NO: 1 to remove the furin cleavage site and to mutate residues 986 and 987 to proline; and the second nucleic acid (e.g., the second mRNA) comprises an optimized nucleotide sequence encoding a full-length SARS-COV-2 spike protein which has been modified relative to naturally occurring full-length SARS-COV-2 spike protein of SEQ ID NO: 1 to remove the furin cleavage site and to mutate residues 986 and 987 to proline and further contains the L18F, D80A, D215G, L242-, A243-, L244-, K417N, E484K, N501Y, D614G and A701V mutations. In a particular embodiment, the pharmaceutical composition comprising the first and second mRNAs is capable of eliciting a broadly neutralizing antibody response against naturally occurring variants of SARS-COV-2, including the Wuhan index strain as well as variants observed in South Africa, Japan, Brazil, the UK, India and California. In some embodiments, the pharmaceutical composition comprising the first and second mRNAs is capable of eliciting a neutralizing antibody response against SARS-CoV-1. In a specific embodiment, the pharmaceutical composition comprising the first and second mRNAs is capable of eliciting a neutralizing antibody response to a β-coronavirus expressing a spike protein which binds to angiotensin-converting enzyme 2 (ACE2). In some embodiments, the spike protein is at least 75% (e.g., at least 80%, 90%, 95% or 99%) identical to SEQ ID NO: 1. The first nucleic acid may comprise an optimized nucleotide sequence which encodes an amino acid sequence comprising SEQ ID NO:11, optionally wherein the optimized nucleotide sequence has the nucleic acid sequence of SEQ ID NO: 44. The second nucleic acid comprises an optimized nucleotide sequence that encodes an amino acid sequence comprising SEQ ID NO: 167, optionally wherein the optimized nucleotide sequence has the nucleic acid sequence of SEQ ID NO: 166. For example, the optimized nucleotide sequence of the first mRNA may have the nucleic acid sequence of SEQ ID NO: 148, wherein the optimized nucleotide sequence of the second mRNA may have the nucleic acid sequence of SEQ ID NO: 173. Typically, the at least two nucleic acids are encapsulated in lipid nanoparticles. For example, the first nucleic acid and the second nucleic acid may be encapsulated in the same lipid nanoparticle. Alternatively, the first nucleic acid and the second nucleic may be encapsulated in separate lipid nanoparticles.

[0354] As shown in the examples, subjects who have previously been immunized with a vaccine that elicits neutralizing antibodies against the S protein of the SARS-COV-2 index strain from Wuhan (SEQ ID NO: 1) and who are administered about 9 months later an mRNA vaccine comprising an optimized nucleotide sequence of the invention that encodes a prefusion stabilized South African variant of the SARS-COV-2 S protein are able to mount a broadly neutralizing antibody response effective against a wide variety of S proteins expressed by naturally occurring variants of the original SARS-COV-2 Wuhan strain as well as other β-coronaviruses, in particular those expressing a spike protein which binds to angiotensin-converting enzyme 2 (ACE2), such as SARS-COV-1.

[0355] Accordingly, in some embodiments, the pharmaceutical compositions of the invention are for use in the prophylaxis of an infection caused by a β-coronavirus, in particular a β-coronavirus expressing a spike protein which binds to angiotensin-converting enzyme 2 (ACE2). In some embodiments, the pharmaceutical compositions of the invention are for use in the manufacture of a medicament for the prophylaxis of an infection caused by a β-coronavirus, in particular a β-coronavirus expressing a spike protein which binds to angiotensin-converting enzyme 2 (ACE2). In some embodiments, the spike protein is at least 75% (e.g., at least 80%, 90%, 95% or 99%) identical to SEQ ID NO: 1. In a typical embodiment, the β-coronavirus is SARS-COV-2 (e.g., a naturally occurring variant of the Wuhan index strain, such as a South Africa variant, a Japanese variant, a Brazilian variant, a UK variant, an Indian variant or a California variant).

[0356] In a specific embodiment, the invention provides a method of preventing an infection caused by SARS-COV-2, wherein said method comprises administering to a subject an effective amount of an immunogenic composition comprising an mRNA construct, wherein said mRNA construct comprises an optimized nucleotide sequence encoding a full-length SARS-COV-2 spike protein which has been modified relative to naturally occurring full-length SARS-COV-2 spike protein of SEQ ID NO: 1 to remove the furin cleavage site and to mutate residues 986 and 987 to proline and further contains the L18F, D80A, D215G, L242-, A243-, L244-, K417N, E484K, N501Y, D614G and A701V mutations, wherein said immunogenic composition is administered to the subject at least 3 months (e.g., about 6 months, about 9 months or about 12 months) after the subject was immunized with a first COVID-19 vaccine and a second COVID-19 vaccine, wherein said first and second COVID-19 vaccines were administered to the subject at least two weeks apart from each other and wherein said first and second COVID-19 vaccines were designed to elicit neutralizing antibodies against the S protein of SARS-COV-2, e.g., the S-protein of the SARS-COV-2 index strain from Wuhan (SEQ ID NO: 1). In some embodiments, the first and second COVID-19 vaccines are identical. In other embodiments, said first and second vaccines are different. In particular embodiments, said first and second COVID-19 vaccines are produced by Moderna (COVID-19 Vaccine Moderna, such as for example, mRNA-1273 or mRNA-1283), CureVac (CVnCOV), Johnson & Johnson (COVID-19 Vaccine Janssen), AstraZeneca (Vaxzevria), Pfizer/BioNTech (Comirnaty), Sputnik (Gam-COVID-Vac), Sinovac (COVID-19 Vaccine (Vero Cell) Inactivated) or Novavax (NVX-CoV2373).

[0357] In some embodiments, the immunogenic composition is capable of eliciting a broadly neutralizing antibody response against naturally occurring variants of SARS-COV-2, including the Wuhan index strain as well as variants observed in South Africa, Japan, Brazil, the UK, India and California. In some embodiments, the immunogenic composition is capable of eliciting a neutralizing antibody response against SARS-COV-1. In particular embodiments, the immunogenic composition is capable of eliciting a neutralizing antibody response to a β-coronavirus expressing a spike protein which binds to angiotensin-converting enzyme 2 (ACE2). In particular embodiments, the spike protein is at least 75% (e.g., at least 80%, 90%, 95% or 99%) identical to SEQ ID NO: 1. In particular embodiments, the optimized nucleotide sequence encodes an amino acid sequence comprising SEQ ID NO: 167, optionally wherein the optimized nucleotide sequence has the nucleic acid sequence of SEQ ID NO: 173. In a specific embodiment, the mRNA construct is mRNA construct 2. In particular embodiments, said mRNA construct is encapsulated in a lipid nanoparticle which has a lipid component consisting of cKK-E10, DOPE, cholesterol and DMG-PEG2K, e.g., at the molar ratios 40:30:28.5:1.5. In some embodiments, the immunogenic composition comprises between 7 μg and 135 μg of the mRNA construct, e.g., 7.5 μg, 15 μg, 45 μg or 135 μg.

### Further Exemplary Embodiments of the Invention

[0358] In one aspect, the invention provides a nucleic acid comprising an optimized nucleotide sequence encoding a SARS-COV-2 antigen, wherein the optimized nucleotide sequence consists of codons associated with a usage frequency which is greater than or equal to 10%; wherein the optimized nucleotide sequence:
[0359] (i) does not contain a termination signal having one of the following nucleotide sequences:
   [0360] 5′-X₁ATCTX₂TX₃-3′, wherein X₁, X₂ and X₃ are independently selected from A, C, T or G; and 5′-X₁AUCUX₂UX₃-3′, wherein X₁, X₂ and X₃ are independently selected from A, C, U or G;
[0361] (ii) does not contain any negative cis-regulatory elements and negative repeat elements; and
[0362] (iii) has a codon adaptation index greater than 0.8;
[0363] wherein, when divided into non-overlapping 30 nucleotide-long portions, each portion of the optimized nucleotide sequence has a guanine cytosine content range of 30%-70%.

[0364] In certain embodiments, the optimized nucleotide sequence does not contain a termination signal having one of the following sequences: TATCTGTT; TTTTTT; AAGCTT; GAAGAGC; TCTAGA; UAUCUGUU; UUUUUU; AAGCUU; GAAGAGC; UCUAGA. In certain embodiments the nucleic acid is mRNA or DNA.

[0365] In the following, modified SARS-COV-2 spike proteins or antigenic fragments thereof are described by reference to particular optimized nucleic acid sequences. It should be understood that, although these modified SARS-COV-2 spike protein or an antigenic fragment may have particular utility in the context of the disclosed nucleic acid-based vaccines of the invention, they may also have utility in protein-based vaccines. Moreover, the optimized nucleic acid sequences may also be useful in the efficient production of such protein-based vaccines.

[0366] In certain aspects, the nucleic acid of the invention is an optimized nucleotide sequence encoding the SARS-COV-2 spike protein or an antigenic fragment thereof. In certain embodiments, the optimized nucleotide sequence encodes the full-length SARS-COV-2 spike protein. In specific embodiments, the optimized nucleotide sequence encodes an amino acid sequence comprising SEQ ID NO:1. In other embodiments, the nucleic acid of the invention is an optimized nucleotide sequence encoding the ectodomain of the SARS-COV-2 spike protein or an antigenic fragment thereof. In specific embodiments, the optimized nucleotide sequences encode an amino acid sequence comprising SEQ ID NO:2. In certain embodiments, the antigenic fragment comprises the receptor-binding domain (RBD) of the SARS-COV-2 spike protein. In specific embodiments, the optimized nucleotide sequencing encodes an amino acid sequence comprising SEQ ID NO:6.

[0367] In certain embodiments, the antigenic fragment further comprises a signal sequence. In certain embodiments, the signal sequence is SEQ ID NO: 7. In other embodiments, the optimized nucleotide sequence of the invention encodes an amino acid sequence comprising SEQ ID NO:8. In certain embodiments, the signal sequence is SEQ ID NO: 142. In other embodiments, the optimized nucleotide sequence of the invention encodes an amino acid sequence comprising SEQ ID NO: 143. In further aspects of the invention the antigenic fragment can additional comprises an Fc region. In specific embodiments, the Fc region has the amino acid sequence of SEQ ID NO: 18. In certain embodiments, the antigenic fragment further comprises a signal sequence and an Fc region.

[0368] In certain embodiments, the antigenic fragment consists of the RBD of the SARS-COV-2 spike protein operably linked to a signal sequence and an Fc region. In particular embodiments, the optimized nucleotide sequences encode an amino acid sequence comprising SEQ ID NO:20.

[0369] In other embodiments, the SARS-COV-2 spike protein, the ectodomain of the SARS-CoV-2 spike protein or the antigenic fragment thereof has been modified to form a stable prefusion conformation. In certain embodiments, the SARS-COV-2 spike protein, the ectodomain of the SARS-COV-2 spike protein or the antigenic fragment has been modified relative to naturally occurring SARS-COV-2 spike protein to remove the furin cleavage site required for activation. In specific embodiments, the optimized nucleotide sequence encodes a SARS-COV-2 S protein which has been modified relative to naturally occurring SARS-COV-2 spike protein to remove the furin cleavage site required for activation. In further specific embodiments, the optimized nucleotide sequences encode an amino acid sequence comprising SEQ ID NO:9.

[0370] In certain embodiments, the SARS-COV-2 spike protein, the ectodomain of the SARS-CoV-2 spike protein or the antigenic fragment thereof has been modified relative to naturally occurring SARS-COV-2 spike protein to mutate residue 985 to proline and/or mutate residues 986 and 987 to proline. In specific embodiments, the optimized nucleotide sequence encodes a SARS-CoV-2 S protein which has been modified relative to naturally occurring SARS-COV-2 spike protein to mutate residues 986 and 987 to proline. In further specific embodiments, the optimized nucleotide sequence encodes an amino acid sequence comprising SEQ ID NO: 10. In further specific embodiments, the optimized nucleotide sequence encodes an amino acid sequence comprising SEQ ID NO: 118.

[0371] In certain embodiments, the optimized nucleotide sequence encodes a SARS-COV-2 S protein which has been modified relative to naturally occurring SARS-COV-2 spike protein to mutate residues 985, 986 and 987 to proline. In specific embodiments, the optimized nucleotide sequences encode an amino acid sequence comprising SEQ ID NO: 92.

[0372] In certain embodiments, the SARS-COV-2 spike protein, the ectodomain of the SARS-CoV-2 spike protein or the antigenic fragment thereof has been modified relative to naturally occurring SARS-COV-2 spike protein to remove the furin cleavage site and to mutate (a) residues 985 to proline; and/or (b) residues 986 and 987 to proline. In specific embodiments, the SARS-CoV-2 spike protein, the ectodomain of the SARS-COV-2 spike protein or the antigenic fragment thereof has been modified relative to naturally occurring SARS-COV-2 spike protein to remove the furin cleavage site and to mutate residues 986 and 987 to proline. In certain embodiments, the optimized nucleotide sequence encodes a SARS-COV-2 S protein. In specific embodiments, the optimized nucleotide sequence encodes an amino acid sequence comprising SEQ ID NO:11. For example, the optimized nucleotide sequence has the nucleic acid sequence of SEQ ID NO: 44 or SEQ ID NO: 148. In further specific embodiments, the optimized nucleotide sequence encodes an amino acid sequence comprising SEQ ID NO:120. For example, the optimized nucleotide sequence encodes the ectodomain of the SARS-COV-2 S protein. In specific embodiments, the optimized nucleotide sequences encode an amino acid sequence comprising SEQ ID NO:12.

[0373] In certain embodiments, the SARS-COV-2 spike protein, the ectodomain of the SARS-CoV-2 spike protein or the antigenic fragment thereof has been modified relative to naturally occurring SARS-COV-2 spike protein to remove the furin cleavage site and to mutate residues 985, 986 and 987 to proline. In specific embodiments, the optimized nucleotide sequence encodes a SARS-COV-2 S protein. In further specific embodiments the optimized nucleotide sequences encodes an amino acid sequence comprising SEQ ID NO:94.

[0374] In certain embodiments, the SARS-COV-2 spike protein, the ectodomain thereof or the antigenic fragment thereof has been modified relative to mutate residues 986 and 987 to proline and to contain the D614G mutation. In specific embodiments, the optimized nucleotide sequences encodes an amino acid sequence comprising SEQ ID NO: 118.

[0375] In certain embodiments, the SARS-COV-2 spike protein, the ectodomain thereof or the antigenic fragment thereof has been modified relative to remove the furin cleavage site, to mutate residues 986 and 987 to proline and to contain the D614G mutation. In specific embodiments, the optimized nucleotide sequences encodes an amino acid sequence comprising SEQ ID NO: 120.

[0376] In certain embodiments, the SARS-COV-2 spike protein, the ectodomain thereof or the antigenic fragment thereof has been modified relative to naturally occurring SARS-COV-2 spike protein to mutate residues by 817, 892, 899, 942, 986 and 987 to proline. In specific embodiments, the optimized nucleotide sequences encodes an amino acid sequence comprising SEQ ID NO: 129.

[0377] In certain embodiments, the SARS-COV-2 spike protein, the ectodomain thereof or the antigenic fragment thereof has been modified relative to naturally occurring SARS-COV-2 spike protein to remove the furin cleavage site and to mutate residues by 817, 892, 899, 942, 986 and 987 to proline. In specific embodiments, the optimized nucleotide sequences encodes an amino acid sequence comprising SEQ ID NO: 131.

[0378] In certain embodiments, the SARS-COV-2 spike protein, the ectodomain thereof or the antigenic fragment thereof has been modified relative to naturally occurring SARS-COV-2 spike protein to mutate residues 817, 892, 899, 942, 986 and 987 to proline and which contains the D614G mutation. In specific embodiments, the optimized nucleotide sequences encodes an amino acid sequence comprising SEQ ID NO: 133.

[0379] In certain embodiments, the SARS-COV-2 spike protein, the ectodomain thereof or the antigenic fragment thereof has been modified relative to naturally occurring SARS-COV-2 spike protein to remove the furin cleavage site and to mutate residues 817, 892, 899, 942, 986 and 987 to proline and which contains the D614G mutation. In specific embodiments, the optimized nucleotide sequences encodes an amino acid sequence comprising SEQ ID NO: 135.

[0380] In certain embodiments, the SARS-COV-2 spike protein, the ectodomain thereof or the antigenic fragment thereof has been modified relative to naturally occurring SARS-COV-2 spike protein to remove the furin cleavage site, to mutate residues 986 and 987 to proline and which contains an extended N-terminal signal peptide. In specific embodiments, the optimized nucleotide sequences encodes an amino acid sequence comprising SEQ ID NO: 123. In certain embodiments, the SARS-COV-2 spike protein, the ectodomain thereof or the antigenic fragment thereof has been modified relative to naturally occurring SARS-COV-2 spike protein to remove the furin cleavage site, to mutate residues 817, 892, 899, 942, 986 and 987 to proline and which contains an extended N-terminal signal peptide. In specific embodiments, the optimized nucleotide sequences encodes an amino acid sequence comprising SEQ ID NO: 137.

[0381] In certain embodiments, the SARS-COV-2 spike protein, the ectodomain thereof or the antigenic fragment thereof c been modified relative to naturally occurring SARS-COV-2 spike protein to mutate the ER retrieval signal. In certain embodiments, the wherein the SARS-COV-2 spike protein, the ectodomain thereof or the antigenic fragment thereof has been modified relative to naturally occurring SARS-COV-2 spike protein to remove the furin cleavage site, to mutate residues 986 and 987 to proline and to remove the ER retrieval signal. In specific embodiments, the optimized nucleotide sequences encodes an amino acid sequence comprising SEQ ID NO: 125.

[0382] In certain embodiments, the SARS-COV-2 spike protein, the ectodomain thereof or the antigenic fragment thereof has been modified relative to naturally occurring SARS-COV-2 spike protein to remove the furin cleavage site, to mutate residues 986 and 987 to proline, to remove the ER retrieval signal and which contains an extended N-terminal signal peptide. In specific embodiments, the optimized nucleotide sequences encodes an amino acid sequence comprising SEQ ID NO: 127.

[0383] In certain embodiments, the SARS-COV-2 spike protein, the ectodomain thereof or the antigenic fragment thereof has been modified relative to naturally occurring SARS-COV-2 spike protein to remove the furin cleavage site, to mutate residues 817, 892, 899, 942, 986 and 987 to proline and to remove the ER retrieval signal. In specific embodiments, the optimized nucleotide sequences encodes an amino acid sequence comprising SEQ ID NO: 139.

[0384] In certain embodiments, the SARS-COV-2 spike protein, the ectodomain thereof or the antigenic fragment thereof has been modified relative to naturally occurring SARS-COV-2 spike protein to remove the furin cleavage site, to mutate residues 817, 892, 899, 942, 986 and 987 to proline, to remove the ER retrieval signal and which contains an extended N-terminal signal peptide. In specific embodiments, the optimized nucleotide sequences encodes an amino acid sequence comprising SEQ ID NO: 141.

[0385] In certain embodiments, an antigenic fragment comprises or consists of the S1, S2 or S2′ subunit of the SARS-COV-2 spike protein. In certain embodiments, the optimized nucleotide sequences encode an amino acid sequence comprising SEQ ID NO: 3, SEQ ID NO: 4 or SEQ ID NO: 5.

[0386] In certain embodiments, an optimized nucleotide sequence encodes a fusion peptide comprising one or more antigenic fragments of the SARS-COV-2 S protein. In specific embodiments, the one or more antigenic fragments of the SARS-COV-2 S protein has/have the amino acid sequence of SEQ ID NO: 21, the amino acid sequence SEQ ID NO: 22, the amino acid sequence SEQ ID NO: 23 and/or the amino acid sequence SEQ ID NO: 24.

[0387] In certain embodiments, the one or more antigenic fragments are linked by a linker sequence, e.g., GGGGS. In specific embodiments, the optimized nucleotide sequence encodes a fusion peptide comprising SEQ ID NO: 25 or SEQ ID NO: 27. In certain embodiments the fusion peptide comprises an N terminal signal sequence, for example the optimized nucleotide sequence encodes a fusion peptide comprising SEQ ID NO: 51 or SEQ ID NO: 53. In certain embodiments the fusion peptide comprises a C-terminal Fc domain. In other embodiments, the fusion peptide comprises an N terminal signal sequence and a C-terminal Fc domain. In specific embodiments, the optimized nucleotide sequence encodes a fusion peptide comprising SEQ ID NO: 55 or SEQ ID NO: 57.

[0388] In other aspects, the nucleic acid of the invention as disclosed above is for use in therapy. For example, the nucleic acid of the invention as disclosed above may be for use in the manufacture of a medicament for the prophylaxis of an infection with SARS-COV-2. In other aspects an immunogenic composition comprising the nucleic acid of the invention for use in prophylaxis of an infection with SARS-COV-2 is provided. The invention also provides methods of treating or preventing a SARS-COV-2 infection, said method comprising administering to a subject an effective amount of an immunogenic composition comprising the nucleic acid of the invention.

[0389] In other aspects, an immunogenic composition according to the invention comprises at least two nucleic acids, for use in prophylaxis of an infection with SARS-COV-2 is provided wherein a first nucleic acid comprises an optimized nucleotide sequence which encodes an amino acid sequence comprising a sequence selected from SEQ ID NO: 1, 2, 3, 4, 5, 8, 9, 10, 11, 12, 14, 15, 16, 17, 19, 20, 35, 66, 68, 70, 72, 74, 76, 78, 80, 82, 84. 86, 88, 90, 92, 94, 96, 98, 104, 106, 108, 110, 118, 120, 123, 125, 127, 129, 131, 133, 135, 137, 139 or 141, and wherein one or more further nucleic acid(s) comprise(s) an optimized nucleotide sequence which encodes an amino acid sequence comprising a sequence selected from SEQ ID NO: 151, 153, 155, 157, 159, 161, 163, 165, 167, 169 or 171.

[0390] In other aspects, an immunogenic composition according to the invention comprises at least two nucleic acids, for use in prophylaxis of an infection with SARS-COV-2 is provided, wherein a first nucleic acid comprises an optimized nucleotide sequence which encodes an amino acid sequence comprising SEQ ID NO:11, optionally wherein the optimized nucleotide sequence has the nucleic acid sequence of SEQ ID NO: 44, and wherein one or more further nucleic acid(s) is (are) selected from:
[0391] (a) a nucleic acid comprising an optimized nucleotide sequence which encodes an amino acid sequence comprising a sequence selected from SEQ ID NO: 157, optionally wherein the optimized nucleotide sequence has the nucleic acid sequence of SEQ ID NO 156, and
[0392] (b) nucleic acid comprises an optimized nucleotide sequence that encodes an amino acid sequence comprising a sequence selected from SEQ ID NO: 163, optionally wherein the optimized nucleotide sequence has the nucleic acid sequence of SEQ ID NO: 162; and
[0393] (c) nucleic acid comprises an optimized nucleotide sequence that encodes an amino acid sequence comprising a sequence selected from SEQ ID NO: 167, optionally wherein the optimized nucleotide sequence has the nucleic acid sequence of SEQ ID NO: 166; and
[0394] (d) nucleic acid comprises an optimized nucleotide sequence that encodes an amino acid sequence comprising a sequence selected from SEQ ID NO: 171, optionally wherein the optimized nucleotide sequence has the nucleic acid sequence of SEQ ID NO: 170.

[0395] Certain aspects, the invention provides a pharmaceutical composition comprising i) a nucleic acid of the invention and ii) a lipid nanoparticle. In certain embodiments, the nucleic acid is encapsulated in the lipid nanoparticle. The lipid nanoparticle can comprise one or more of a cationic lipid, a non-cationic lipid, a cholesterol-based lipid, a PEG-modified lipid, or a combination thereof. In certain embodiments, the lipid nanoparticle comprises a cationic lipid, a non-cationic lipid, a cholesterol-based lipid, and a PEG-modified lipid.

[0396] In certain embodiments, the lipid nanoparticle comprises a cationic lipid, a non-cationic lipid, and a PEG-modified lipid. In certain embodiments, the lipid nanoparticle comprises:
[0397] (a) a cationic lipid selected from DOTAP (1,2-dioleyl-3-trimethylammonium propane), DODAP (1,2-dioleyl-3-dimethylammonium propane), DOTMA (N-[1-(2,3-dioleyloxy) propyl]-N,N,N-trimethylammonium chloride), DLinKC2DMA, DLin-KC2-DM, C12-200, cKK-E12, cKK-E10, HGT5000, HGT5001, HGT4003, ICE, HGT4001, HGT4002, TL1-01D-DMA, TL1-04D-DMA, TL1-08D-DMA, TL1-10D-DMA, OF-Deg-Lin and OF-02;
[0398] (b) a non-cationic lipid selected from DSPC (1,2-distearoyl-sn-glycero-3-phosphocholine), DPPC (1,2-dipalmitoyl-sn-glycero-3-phosphocholine), DOPE (1,2-dioleyl-sn-glycero-3-phosphoethanolamine), DEPE 1,2-dierucoyl-sn-glycero-3-phosphoethanolamine, DOPC (1,2-dioleyl-sn-glycero-3-phosphotidylcholine), DPPE (1,2-dipalmitoyl-sn-glycero-3-phosphoethanolamine), DMPE (1,2-dimyristoyl-sn-glycero-3-phosphoethanolamine), and DOPG (1,2-dioleoyl-sn-glycero-3-phospho-(l′-rac-glycerol));
[0399] (c) a cholesterol-based lipid selected from DC-Choi (N,N-dimethyl-N-ethylcarboxamidocholesterol), 1,4-bis(3-N-oleylamino-propyl) piperazine, or imidazole cholesterol ester (ICE); and/or
[0400] (d) a PEG-modified lipid selected from PEGylated cholesterol and DMG-PEG-2K.

[0401] In certain embodiments of the pharmaceutical composition the
[0402] a. the cationic lipid is selected from cKK-E12, cKK-E10, OF-Deg-Lin and OF-02;
[0403] b. the non-cationic lipid is selected from DOPE and DEPE;
[0404] c. the cholesterol-based lipid is cholesterol; and
[0405] d. the PEG-modified lipid is DMG-PEG-2K.

[0406] In certain embodiments, the cationic lipid constitutes about 30-60% of the lipid nanoparticle by molar ratio, e.g., about 35-40%. In certain embodiments, the ratio of cationic lipid to non-cationic lipid to cholesterol-based lipid to PEG-modified lipid is approximately 30-60:25-35:20-30:1-15 by molar ratio or wherein the ratio of cationic lipid to non-cationic lipid to PEG-modified lipid is approximately 55-65:30-40:1-15 by molar ratio.

[0407] In certain embodiments, the lipid nanoparticle includes a combination of a cationic lipid, a non-cationic lipid, a PEG-modified lipid and optionally cholesterol selected from cKK-E12, DOPE, cholesterol and DMG-PEG2K; cKK-E10, DOPE, cholesterol and DMG-PEG2K; OF-Deg-Lin, DOPE, cholesterol and DMG-PEG2K; OF-02, DOPE, cholesterol and DMG-PEG2K; TL1-01D-DMA, DOPE, cholesterol and DMG-PEG2K; TL1-04D-DMA, DOPE, cholesterol and DMG-PEG2K; TL1-08D-DMA, DOPE, cholesterol and DMG-PEG2K; TL1-10D-DMA, DOPE, cholesterol and DMG-PEG2K; ICE, DOPE and DMG-PEG2K; HGT4001, DOPE and DMG-PEG2K; or HGT4002, DOPE and DMG-PEG2K.

[0408] In certain embodiments, the lipid nanoparticle has an average size of less than 150 nm, e.g., less than 100 nm. In specific embodiments, the lipid nanoparticle has an average size of about 50-70 nm, e.g., about 55-65 nm.

[0409] In certain embodiments, the lipid nanoparticles are suspended in 10% trehalose in water for injection. In certain embodiments, the nucleic acid is mRNA at a concentration of between about 0.5 mg/mL to about 1.0 mg/mL.

[0410] In certain aspects, the invention provides a pharmaceutical composition comprising i) an optimized nucleic acid of invention (e.g., an mRNA) and ii) a lipid nanoparticle. Such pharmaceutical compositions are for use in treating or preventing an infection with SARS-COV-2. In certain embodiments, the pharmaceutical composition is administered parenterally. In certain embodiments, the pharmaceutical composition is administered intravenously, intradermally, subcutaneously, or intramuscularly. In specific embodiments the pharmaceutical composition is administered intravenously or intramuscularly.

[0411] In certain embodiments, the pharmaceutical composition is administered at least once. In specific embodiments, the pharmaceutical composition is administered at least twice. In more specific embodiments, the period between administrations is at least 2 weeks, e.g. 1 month. In some embodiments, the period between administrations is about 3 weeks.

[0412] In certain aspects, the invention provides a SARS-COV-2 antigen. For example, the SARS-COV-2 antigen can be any of the SARS-COV-2 spike proteins, antigenic fragments or fusion peptides of antigenic fragments which are described above or in more detail below in reference to particular optimized nucleic acid sequences. In some embodiments, the SARS-COV-2 antigen is a polypeptide comprising or consisting of the amino acid sequence of SEQ ID NO: 1. In some embodiments, the SARS-COV-2 antigen is a polypeptide comprising or consisting of the amino acid sequence of SEQ ID NO: 10 . . . . In some embodiments, the SARS-COV-2 antigen is a polypeptide comprising or consisting of the amino acid sequence of SEQ ID NO: 9. In some embodiments, the SARS-COV-2 antigen is a polypeptide comprising or consisting of the amino acid sequence of SEQ ID NO: 11. In some embodiments, the SARS-COV-2 antigen is a polypeptide comprising or consisting of the amino acid sequence of SEQ ID NO:2. In some embodiments, the SARS-COV-2 antigen is a polypeptide comprising or consisting of the amino acid sequence of SEQ ID NO: 12. In some embodiments, the SARS-COV-2 antigen is a polypeptide comprising or consisting of the amino acid sequence of SEQ ID NO:3. In some embodiments, the SARS-COV-2 antigen is a polypeptide comprising or consisting of the amino acid sequence of SEQ ID NO:8. In some embodiments, the SARS-COV-2 antigen is a polypeptide comprising or consisting of the amino acid sequence of SEQ ID NO:20. In some embodiments, the SARS-COV-2 antigen is a polypeptide comprising or consisting of the amino acid sequence of SEQ ID NO: 17. In some embodiments, the SARS-COV-2 antigen is a polypeptide comprising or consisting of the amino acid sequence of SEQ ID NO:14. In some embodiments, the SARS-COV-2 antigen is a polypeptide comprising or consisting of the amino acid sequence of SEQ ID NO:16. In some embodiments, the SARS-COV-2 antigen is a polypeptide comprising or consisting of the amino acid sequence of SEQ ID NO:66. In some embodiments, the SARS-COV-2 antigen is a polypeptide comprising or consisting of the amino acid sequence of SEQ ID NO:15. In some embodiments, the SARS-COV-2 antigen is a polypeptide comprising or consisting of the amino acid sequence of SEQ ID NO:82. In some embodiments, the SARS-COV-2 antigen is a polypeptide comprising or consisting of the amino acid sequence of SEQ ID NO:84. In some embodiments, the SARS-COV-2 antigen is a polypeptide comprising or consisting of the amino acid sequence of SEQ ID NO:74. In some embodiments, the SARS-COV-2 antigen is a polypeptide comprising or consisting of the amino acid sequence of SEQ ID NO:76. In some embodiments, the SARS-COV-2 antigen is a polypeptide comprising or consisting of the amino acid sequence of SEQ ID NO:78. In some embodiments, the SARS-COV-2 antigen is a polypeptide comprising or consisting of the amino acid sequence of SEQ ID NO:80. In some embodiments, the SARS-COV-2 antigen is a polypeptide comprising or consisting of the amino acid sequence of SEQ ID NO:68. In some embodiments, the SARS-COV-2 antigen is a polypeptide comprising or consisting of the amino acid sequence of SEQ ID NO:70. In some embodiments, the SARS-COV-2 antigen is a polypeptide comprising or consisting of the amino acid sequence of SEQ ID NO:96. In some embodiments, the SARS-COV-2 antigen is a polypeptide comprising or consisting of the amino acid sequence of SEQ ID NO:86. In some embodiments, the SARS-COV-2 antigen is a polypeptide comprising or consisting of the amino acid sequence of SEQ ID NO:88. In some embodiments, the SARS-COV-2 antigen is a polypeptide comprising or consisting of the amino acid sequence of SEQ ID NO:90. In some embodiments, the SARS-COV-2 antigen is a polypeptide comprising or consisting of the amino acid sequence of SEQ ID NO:92. In some embodiments, the SARS-COV-2 antigen is a polypeptide comprising or consisting of the amino acid sequence of SEQ ID NO:94. In some embodiments, the SARS-COV-2 antigen is a polypeptide comprising or consisting of the amino acid sequence of SEQ ID NO: 118. In some embodiments, the SARS-COV-2 antigen is a polypeptide comprising or consisting of the amino acid sequence of SEQ ID NO: 120.

[0413] In further aspects, the invention provides a peptide fusion construct comprising one or more antigenic regions of the SARS-COV-2 S protein, where the one or more antigenic regions comprises or consists of the following components: FP, D1, D2 and/or B1, wherein FP comprises residues 815-833 of the SARS-COV-2 S protein, wherein DI comprises residues 820-846 of the SARS-COV-2 S protein, wherein D2 comprises residues 1078-1111 of the SARS-COV-2 S protein, and wherein B1 comprises residues 798-829 of the SARS-COV-2 S protein. The peptide fusion construct may have the following structure: D1-linker-FP-linker-D2-linker-D1. DI may have the sequence of SEQ ID NO: 22. FP may have the sequence of SEQ ID NO: 21. The linker comprises or consists of the amino acid sequence GGGGS. For example, the peptide fusion construct may comprise or consist of the sequence of SEQ ID NO: 25 or 51, 55. Alternatively, the peptide fusion construct may have the following structure: FP-linker-FP-linker-FP, D1-linker-D1-linker-D1, or FP/D1-linker-FP/D1-linker-FP/D1. The FP/D1 portion may have the sequence of SEQ ID NO: 99. The linker may comprise or consist of the amino acid sequence GGGGS. For example, the peptide fusion construct may comprise or consist of the sequence of SEQ ID NO: 27 or 53, 57

[0414] The invention also provides a pharmaceutical composition comprising the SARS-COV-2 antigen or the peptide fusion construct of the invention. In some embodiments, the pharmaceutical composition further comprising an adjuvant. In certain embodiments, the adjuvant is selected from alum, CpG, PolyI:C, MF59, AS01, AS02, AS03, AS04, AF03, flagellin, ISCOMs and ISCOMMATRIX. In some aspects, the pharmaceutical composition is for use in treating or preventing an infection with SARS-COV-2. In some embodiments, the pharmaceutical composition is administered parenterally. In some embodiments, the pharmaceutical composition is administered intradermally, subcutaneously, or intramuscularly. In some embodiments, the pharmaceutical composition is administered intramuscularly. In some embodiments, the pharmaceutical composition is administered at least once. In some embodiments, the pharmaceutical composition is administered at least twice. In some embodiments, the period between administrations is at least 2 weeks, e.g. 1 month. In some embodiments, the period between administrations is about 3 weeks.

[0415] In a particular embodiment, the invention provides an mRNA construct consisting of the following structural elements:
[0416] (i) a 5′ cap with the following structure:

[chemical structure]

[0417] (ii) a 5′ untranslated region (5′ UTR) having the nucleic acid sequence of SEQ ID NO: 144;
[0418] (iii) a protein coding region having the nucleic acid sequence of SEQ ID NO: 148;
[0419] (iv) a 3′ untranslated region (3′ UTR) having the nucleic acid sequence of SEQ ID NO: 145; and
[0420] (v) a polyA tail.

[0421] In a specific embodiment, the invention provides a lipid nanoparticle encapsulating said mRNA construct. The lipid nanoparticle may comprise a cationic lipid (e.g., cKK-E12, cKK-E10, OF-Deg-Lin or OF-02), a non-cationic lipid (e.g., DOPE or DEPE), a cholesterol-based lipid (e.g., cholesterol) and a PEG-modified lipid (e.g., DMG-PEG-2K). In a particular embodiment, the mRNA construct or the lipid nanoparticle encapsulating it are provided as an immunogenic composition. In some embodiments, the immunogenic composition comprises between 10 μg and 200 μg of the mRNA construct. In particular embodiments, the immunogenic composition comprises between 15 μg and 135 μg (e.g., between 15 μg and 45 μg) of the mRNA construct. In some embodiments, the immunogenic composition may comprise at least 20 μg, at least 25 μg, at least 30 μg, at least 35 μg, at least 40 μg, or at least 45 μg of the mRNA construct. In specific embodiments, the immunogenic composition comprises 15 μg, 45 μg or 135 μg of the mRNA construct. The invention further provides a method of treating or preventing a SARS-COV-2 infection, wherein said method comprises administering to a subject an effective amount of the immunogenic composition. In some embodiments, the immunogenic is administered to the subject at least twice. In some embodiments, the period between administrations is at least 2 weeks. In some embodiments, the period between administrations is about 3 weeks.

[0422] In certain embodiments, the invention is further described by the following numbered embodiments:
[0423] 1. A nucleic acid comprising an optimized nucleotide sequence encoding a SARS-COV-2 antigen, wherein the optimized nucleotide sequence consists of codons associated with a usage frequency which is greater than or equal to 10%; wherein the optimized nucleotide sequence:
[0424] (i) does not contain a termination signal having one of the following nucleotide sequences:
[0425] 5′-X₁ATCTX₂TX₃-3′, wherein X₁, X₂ and X₃ are independently selected from A, C, T or G; and 5′-X₁AUCUX₂UX₃-3′, wherein X₁, X₂ and X₃ are independently selected from A, C, U or G;
[0426] (ii) does not contain any negative cis-regulatory elements and negative repeat elements; and
[0427] (iii) has a codon adaptation index greater than 0.8;
[0428] wherein, when divided into non-overlapping 30 nucleotide-long portions, each portion of the optimized nucleotide sequence has a guanine cytosine content range of 30%-70%.
[0429] 2. The nucleic acid of embodiment 1, wherein the optimized nucleotide sequence does not contain a termination signal having one of the following sequences: TATCTGTT; TTTTTT; AAGCTT; GAAGAGC; TCTAGA; UAUCUGUU; UUUUUU; AAGCUU; GAAGAGC; UCUAGA.
[0430] 3. The nucleic acid of embodiment 1 or 2, wherein the nucleic acid is mRNA.
[0431] 4. The nucleic acid of embodiment 1 or 2, wherein the nucleic acid is DNA.
[0432] 5. The nucleic acid of any one of the preceding embodiments, wherein the optimized nucleotide sequence encodes the SARS-COV-2 spike protein or an antigenic fragment thereof.
[0433] 6. The nucleic acid of embodiment 5, wherein the optimized nucleotide sequence encodes the full-length SARS-COV-2 spike protein.
[0434] 7. The nucleic acid of embodiment 5 or embodiment 6, wherein the optimized nucleotide sequences encodes an amino acid sequence comprising SEQ ID NO:1.
[0435] 8. The nucleic acid of embodiment 5, wherein the optimized nucleotide sequence encodes the ectodomain of the SARS-COV-2 spike protein or an antigenic fragment thereof.
[0436] 9 The nucleic acid of embodiment 8, wherein the optimized nucleotide sequences encodes an amino acid sequence comprising SEQ ID NO:2.
[0437] 10. The nucleic acid of embodiment 5, wherein the antigenic fragment comprises the receptor-binding domain (RBD) of the SARS-COV-2 spike protein.
[0438] 11. The nucleic acid of embodiment 10, wherein the optimized nucleotide sequences encodes an amino acid sequence comprising SEQ ID NO:6.
[0439] 12. The nucleic acid of embodiment 10 or 11, wherein the antigenic fragment further comprises a signal sequence.
[0440] 13. The nucleic acid of embodiment 12, wherein the signal sequence is SEQ ID NO: 7.
[0441] 14. The nucleic acid of embodiment 12 or embodiment 13, wherein the optimized nucleotide sequences encodes an amino acid sequence comprising SEQ ID NO:8.
[0442] 15. The nucleic acid of embodiment 12, wherein the signal sequence is SEQ ID NO: 142.
[0443] 16. The nucleic acid of embodiment 12 or embodiment 13, wherein the optimized nucleotide sequences encodes an amino acid sequence comprising SEQ ID NO:143.
[0444] 17. The nucleic acid of embodiments 10-16, wherein the antigenic fragment further comprises an Fc region.
[0445] 18. The nucleic acid of embodiment 17, wherein the Fc region is SEQ ID NO: 18.
[0446] 19. The nucleic acid of embodiments 10-18, wherein the antigenic fragment further comprises a signal sequence and an Fc region.
[0447] 20. The nucleic acid of embodiments 10-18, wherein the antigenic fragment consists of the RBD of the SARS-COV-2 spike protein operably linked to a signal sequence and an Fc region.
[0448] 21. The nucleic acid of embodiment 20, wherein the optimized nucleotide sequences encodes an amino acid sequence comprising SEQ ID NO:20.
[0449] 22. The nucleic acid of any one of embodiment 5, embodiment 6 or embodiment 8, wherein the SARS-COV-2 spike protein, the ectodomain thereof or the antigenic fragment thereof has been modified relative to naturally occurring SARS-COV-2 spike protein to assume a stable prefusion conformation.
[0450] 23. The nucleic acid of embodiment 22, wherein the SARS-COV-2 spike protein, the ectodomain or the antigenic fragment has been modified relative to naturally occurring SARS-CoV-2 spike protein to remove the furin cleavage site required for activation.
[0451] 24. The nucleic acid of embodiment 23, wherein the optimized nucleotide sequence encodes a SARS-COV-2 spike protein which has been modified relative to naturally occurring SARS-COV-2 spike protein to remove the furin cleavage site required for activation
[0452] 25. The nucleic acid of embodiment 23, wherein the optimized nucleotide sequences encodes an amino acid sequence comprising SEQ ID NO:9.
[0453] 26. The nucleic acid of embodiments 22-25, wherein the SARS-COV-2 spike protein, the ectodomain thereof or the antigenic fragment thereof has been modified relative to naturally occurring SARS-COV-2 spike protein to mutate residue 985 to proline and/or mutate residues 986 and 987 to proline.
[0454] 27. The nucleic acid of embodiment 26, wherein the optimized nucleotide sequence encodes a SARS-COV-2 spike protein which has been modified relative to naturally occurring SARS-COV-2 spike protein to mutate residues 986 and 987 to proline.
[0455] 28. The nucleic acid of embodiment 27, wherein the optimized nucleotide sequences encodes an amino acid sequence comprising SEQ ID NO: 10 or SEQ ID NO: 118.
[0456] 29. The nucleic acid of embodiment 26, wherein the optimized nucleotide sequence encodes a SARS-COV-2 spike protein which has been modified relative to naturally occurring SARS-COV-2 spike protein to mutate residues 985, 986 and 987 to proline.
[0457] 30. The nucleic acid of embodiment 29, wherein the optimized nucleotide sequences encodes an amino acid sequence comprising SEQ ID NO:92.
[0458] 31. The nucleic acid of embodiments 22-30, wherein the SARS-COV-2 spike protein, the ectodomain thereof or the antigenic fragment thereof has been modified relative to naturally occurring SARS-COV-2 spike protein to remove the furin cleavage site and to mutate
[0459] (a) residues 985 to proline; and/or
[0460] (b) residues 986 and 987 to proline.
[0461] 32. The nucleic acid to embodiment 31, wherein the SARS-COV-2 spike protein, the ectodomain of the SARS-COV-2 spike protein or the antigenic fragment thereof has been modified relative to naturally occurring SARS-COV-2 spike protein to remove the furin cleavage site and to mutate residues 986 and 987 to proline.
[0462] 33. The nucleic acid of embodiment 32, wherein the optimized nucleotide sequence encodes a SARS-COV-2 spike protein.
[0463] 34. The nucleic acid of embodiment 33, wherein the optimized nucleotide sequences encodes an amino acid sequence comprising SEQ ID NO:11 or SEQ ID NO: 120, optionally wherein the optimized nucleotide sequence has the nucleic acid sequence of SEQ ID NO: 44 or SEQ ID NO: 148.
[0464] 35. The nucleic acid of embodiment 32, wherein the optimized nucleotide sequence encodes the ectodomain of the SARS-COV-2 spike protein.
[0465] 36. The nucleic acid of embodiment 35, wherein the optimized nucleotide sequences encodes an amino acid sequence comprising SEQ ID NO:12.
[0466] 37. The nucleic acid to embodiment 31, wherein the SARS-COV-2 spike protein, the ectodomain thereof or the antigenic fragment thereof has been modified relative to naturally occurring SARS-COV-2 spike protein to remove the furin cleavage site and to mutate residues 985, 986 and 987 to proline.
[0467] 38. The nucleic acid of embodiment 37, wherein the optimized nucleotide sequence encodes a SARS-COV-2 spike protein.
[0468] 39. The nucleic acid of embodiment 38, wherein the optimized nucleotide sequences encodes an amino acid sequence comprising SEQ ID NO:94.
[0469] 40. The nucleic acid of embodiments 22-39, wherein the SARS-COV-2 spike protein, the ectodomain thereof or the antigenic fragment thereof has been modified relative to mutate residues 986 and 987 to proline and to contain the D614G mutation.
[0470] 41. The nucleic acid of embodiment 40, wherein the optimized nucleotide sequences encodes an amino acid sequence comprising SEQ ID NO: 118.
[0471] 42. The nucleic acid of embodiments 22-41, wherein the SARS-COV-2 spike protein, the ectodomain thereof or the antigenic fragment thereof has been modified relative to remove the furin cleavage site, to mutate residues 986 and 987 to proline and to contain the D614G mutation
[0472] 43. The nucleic acid of embodiment 42, wherein the optimized nucleotide sequences encodes an amino acid sequence comprising SEQ ID NO: 120.
[0473] 44. The nucleic acid of embodiments 22-43, wherein the SARS-COV-2 spike protein, the ectodomain thereof or the antigenic fragment thereof has been modified relative to naturally occurring SARS-COV-2 spike protein to mutate residues by 817, 892, 899, 942, 986 and 987 to proline.
[0474] 45. The nucleic acid of embodiment 44, wherein the optimized nucleotide sequences encodes an amino acid sequence comprising SEQ ID NO: 129.
[0475] 46. The nucleic acid of embodiments 22-45, wherein the SARS-COV-2 spike protein, the ectodomain thereof or the antigenic fragment thereof has been modified relative to naturally occurring SARS-COV-2 spike protein to remove the furin cleavage site and to mutate residues by 817, 892, 899, 942, 986 and 987 to proline.
[0476] 47. The nucleic acid of embodiment 46, wherein the optimized nucleotide sequences encodes an amino acid sequence comprising SEQ ID NO: 131.
[0477] 48. The nucleic acid of embodiments 22-47, wherein the SARS-COV-2 spike protein, the ectodomain thereof or the antigenic fragment thereof has been modified relative to naturally occurring SARS-COV-2 spike protein to mutate residues 817, 892, 899, 942, 986 and 987 to proline and which contains the D614G mutation.
[0478] 49. The nucleic acid of embodiment 48, wherein the optimized nucleotide sequences encodes an amino acid sequence comprising SEQ ID NO: 133.
[0479] 50. The nucleic acid of embodiments 22-49, wherein the SARS-COV-2 spike protein, the ectodomain thereof or the antigenic fragment thereof has been modified relative to naturally occurring SARS-COV-2 spike protein to remove the furin cleavage site and to mutate residues 817, 892, 899, 942, 986 and 987 to proline and which contains the D614G mutation.
[0480] 51. The nucleic acid of embodiment 50, wherein the optimized nucleotide sequences encodes an amino acid sequence comprising SEQ ID NO: 135.
[0481] 52. The nucleic acid of embodiments 22-51, wherein the SARS-COV-2 spike protein, the ectodomain thereof or the antigenic fragment thereof has been modified relative to naturally occurring SARS-COV-2 spike protein to remove the furin cleavage site, to mutate residues 986 and 987 to proline and which contains an extended N-terminal signal peptide.
[0482] 53. The nucleic acid of embodiment 52, wherein the optimized nucleotide sequences encodes an amino acid sequence comprising SEQ ID NO: 123.
[0483] 54. The nucleic acid of embodiments 22-53, wherein the SARS-COV-2 spike protein, the ectodomain thereof or the antigenic fragment thereof has been modified relative to naturally occurring SARS-COV-2 spike protein to remove the furin cleavage site, to mutate residues 817, 892, 899, 942, 986 and 987 to proline and which contains an extended N-terminal signal peptide.
[0484] 55. The nucleic acid of embodiment 54, wherein the optimized nucleotide sequences encodes an amino acid sequence comprising SEQ ID NO: 137.
[0485] 56. The nucleic acid of embodiments 22-55, wherein the SARS-COV-2 spike protein, the ectodomain thereof or the antigenic fragment thereof has been modified relative to naturally occurring SARS-COV-2 spike protein to mutate the ER retrieval signal.
[0486] 57. The nucleic acid of embodiment 56, wherein the SARS-COV-2 spike protein, the ectodomain thereof or the antigenic fragment thereof has been modified relative to naturally occurring SARS-COV-2 spike protein to remove the furin cleavage site, to mutate residues 986 and 987 to proline and to remove the ER retrieval signal.
[0487] 58. The nucleic acid of embodiment 57, wherein the optimized nucleotide sequences encodes an amino acid sequence comprising SEQ ID NO: 125.
[0488] 59. The nucleic acid of embodiment 56, wherein the SARS-COV-2 spike protein, the ectodomain thereof or the antigenic fragment thereof has been modified relative to naturally occurring SARS-COV-2 spike protein to remove the furin cleavage site, to mutate residues 986 and 987 to proline, to remove the ER retrieval signal and which contains an extended N-terminal signal peptide.
[0489] 60. The nucleic acid of embodiment 59, wherein the optimized nucleotide sequences encodes an amino acid sequence comprising SEQ ID NO: 127.
[0490] 61. The nucleic acid of embodiment 56, wherein the SARS-COV-2 spike protein, the ectodomain thereof or the antigenic fragment thereof has been modified relative to naturally occurring SARS-COV-2 spike protein to remove the furin cleavage site, to mutate residues 817, 892, 899, 942, 986 and 987 to proline and to remove the ER retrieval signal.
[0491] 62. The nucleic acid of embodiment 61, wherein the optimized nucleotide sequences encodes an amino acid sequence comprising SEQ ID NO: 139.
[0492] 63. The nucleic acid of embodiment 56, wherein the SARS-COV-2 spike protein, the ectodomain thereof or the antigenic fragment thereof has been modified relative to naturally occurring SARS-COV-2 spike protein to remove the furin cleavage site, to mutate residues 817, 892, 899, 942, 986 and 987 to proline, to remove the ER retrieval signal and which contains an extended N-terminal signal peptide.
[0493] 64. The nucleic acid of embodiment 63, wherein the optimized nucleotide sequences encodes an amino acid sequence comprising SEQ ID NO: 141.
[0494] 65. The nucleic acid of embodiment 5, wherein the antigenic fragment comprises or consists of the S1, S2 or S2′ subunit of the SARS-COV-2 spike protein.
[0495] 66. The nucleic acid of embodiment 65, wherein the optimized nucleotide sequences encodes an amino acid sequence comprising SEQ ID NO: 3, SEQ ID NO: 4 or SEQ ID NO: 5.
[0496] 67. The nucleic acid of embodiments 1-4, wherein the optimized nucleotide sequence encodes a fusion peptide comprising one or more antigenic fragments of the SARS-COV-2 spike protein.
[0497] 68. The nucleic acid of embodiment 67, wherein the one or more antigenic fragments of the SARS-COV-2 spike protein has/have the amino acid sequence of SEQ ID NO: 21, the amino acid sequence SEQ ID NO: 22, the amino acid sequence SEQ ID NO: 23 and/or the amino acid sequence SEQ ID NO: 24.
[0498] 69. The nucleic acid of embodiment 67 or 68, wherein the one or more antigenic fragments are linked by a linker sequence, e.g., GGGGS.
[0499] 70. The nucleic acid of embodiment 69, wherein the optimized nucleotide sequence encodes a fusion peptide comprising SEQ ID NO: 25 or SEQ ID NO: 27.
[0500] 71. The nucleic acid of embodiment 67-70, wherein the fusion peptide comprises an N terminal signal sequence.
[0501] 72. The nucleic acid of embodiment 71, wherein the optimized nucleotide sequence encodes a fusion peptide comprising SEQ ID NO: 51 or SEQ ID NO: 53.
[0502] 73. The nucleic acid of embodiment 67-72, wherein the fusion peptide comprises a C-terminal Fc domain.
[0503] 74. The nucleic acid of embodiment 67-73 wherein the fusion peptide comprises an N terminal signal sequence and a C-terminal Fc domain.
[0504] 75. The nucleic acid of embodiment 74, wherein the optimized nucleotide sequence encodes a fusion peptide comprising SEQ ID NO: 55 or SEQ ID NO: 57.
[0505] 76. The nucleic acid of any one of embodiments 1 to 75 for use in therapy.
[0506] 77. An immunogenic composition comprising the nucleic acid of any one of embodiments 1-76 for use in prophylaxis of an infection with SARS-COV-2.
[0507] 78. A method of treating or preventing a SARS-COV-2 infection, said method comprising administering to a subject an effective amount of an immunogenic composition comprising the nucleic acid of any one of embodiments 1-76.
[0508] 79. A pharmaceutical composition comprising i) the nucleic acid of any one of embodiments 1-76 and ii) a lipid nanoparticle.
[0509] 80. The pharmaceutical composition of embodiment 79, wherein the nucleic acid is encapsulated in the lipid nanoparticle.
[0510] 81. The pharmaceutical composition of embodiment 79 or embodiment 80, wherein the lipid nanoparticle comprises one or more of a cationic lipid, a non-cationic lipid, a cholesterol-based lipid, a PEG-modified lipid, or a combination thereof.
[0511] 82. The pharmaceutical composition of embodiment 81, wherein the lipid nanoparticle comprises a cationic lipid, a non-cationic lipid, a cholesterol-based lipid, and a PEG-modified lipid.
[0512] 83. The pharmaceutical composition of embodiment 79, wherein the lipid nanoparticle comprises a cationic lipid, a non-cationic lipid, and a PEG-modified lipid.
[0513] 84. The pharmaceutical composition of any one of embodiments 79-83, wherein the lipid nanoparticle comprises:
[0514] a. a cationic lipid selected from DOTAP (1,2-dioleyl-3-trimethylammonium propane), DODAP (1,2-dioleyl-3-dimethylammonium propane), DOTMA (N-[1-(2,3-dioleyloxy) propyl]-N,N,N-trimethylammonium chloride), DLinKC2DMA, DLin-KC2-DM, C12-200, cKK-E12, cKK-E10, HGT5000, HGT5001, HGT4003, ICE, HGT4001, HGT4002, TL1-01D-DMA, TL1-04D-DMA, TL1-08D-DMA, TL1-10D-DMA, OF-Deg-Lin and OF-02;
[0515] b. a non-cationic lipid selected from DSPC (1,2-distearoyl-sn-glycero-3-phosphocholine), DPPC (1,2-dipalmitoyl-sn-glycero-3-phosphocholine), DOPE (1,2-dioleyl-sn-glycero-3-phosphoethanolamine), DEPE 1,2-dierucoyl-sn-glycero-3-phosphoethanolamine, DOPC (1,2-dioleyl-sn-glycero-3-phosphotidylcholine), DPPE (1,2-dipalmitoyl-sn-glycero-3-phosphoethanolamine), DMPE (1,2-dimyristoyl-sn-glycero-3-phosphoethanolamine), and DOPG (1,2-dioleoyl-sn-glycero-3-phospho-(1′-rac-glycerol));
[0516] c. a cholesterol-based lipid selected from DC-Choi (N,N-dimethyl-N-ethylcarboxamidocholesterol), 1,4-bis(3-N-oleylamino-propyl) piperazine, or imidazole cholesterol ester (ICE); and/or
[0517] d. a PEG-modified lipid selected from PEGylated cholesterol and DMG-PEG-2K.
[0518] 85. The pharmaceutical composition of embodiment 82, wherein
[0519] a. the cationic lipid is selected from cKK-E12, cKK-E10, OF-Deg-Lin and OF-02;
[0520] b. the non-cationic lipid is selected from DOPE and DEPE;
[0521] c. the cholesterol-based lipid is cholesterol; and
[0522] d. the PEG-modified lipid is DMG-PEG-2K.
[0523] 86. The pharmaceutical composition of any one of embodiments 79-85, wherein cationic lipid constitutes about 30-60% of the lipid nanoparticle by molar ratio, e.g., about 35-40%.
[0524] 87. The pharmaceutical composition of any one of embodiments 79-86, wherein the ratio of cationic lipid to non-cationic lipid to cholesterol-based lipid to PEG-modified lipid is approximately 30-60:25-35:20-30:1-15 by molar ratio or wherein the ratio of cationic lipid to non-cationic lipid to PEG-modified lipid is approximately 55-65:30-40:1-15 by molar ratio.
[0525] 88. The pharmaceutical composition of any one of embodiments 79-87, wherein the lipid nanoparticle includes a combination of a cationic lipid, a non-cationic lipid, a PEG-modified lipid and optionally cholesterol selected from cKK-E12, DOPE, cholesterol and DMG-PEG2K; cKK-E10, DOPE, cholesterol and DMG-PEG2K; OF-Deg-Lin, DOPE, cholesterol and DMG-PEG2K; OF-02, DOPE, cholesterol and DMG-PEG2K; TL1-01D-DMA, DOPE, cholesterol and DMG-PEG2K; TL1-04D-DMA, DOPE, cholesterol and DMG-PEG2K; TL1-08D-DMA, DOPE, cholesterol and DMG-PEG2K; TL1-10D-DMA, DOPE, cholesterol and DMG-PEG2K; ICE, DOPE and DMG-PEG2K; HGT4001, DOPE and DMG-PEG2K; or HGT4002, DOPE and DMG-PEG2K.
[0526] 89. The pharmaceutical composition of any one of embodiments 79-88, wherein the lipid nanoparticle has an average size of less than 150 nm, e.g., less than 100 nm.
[0527] 90. The pharmaceutical composition of embodiment 89, wherein the lipid nanoparticle has an average size of about 50-70 nm, e.g., about 55-65 nm.
[0528] 91. The pharmaceutical composition any one of embodiments 79-90, wherein the lipid nanoparticles are suspended in 10% trehalose in water for injection.
[0529] 92. The pharmaceutical composition any one of embodiments 79-91, wherein the nucleic acid is mRNA at a concentration of between about 0.5 mg/mL to about 1.0 mg/mL.
[0530] 93. The pharmaceutical composition of any one of embodiments 79-92 for use in treating or preventing an infection with SARS-COV-2.
[0531] 94. The pharmaceutical composition for use according to embodiment 79-93, wherein the pharmaceutical composition is administered parenterally.
[0532] 95. The pharmaceutical composition for use according to embodiment 79-93, wherein the pharmaceutical composition is administered intravenously, intradermally, subcutaneously, or intramuscularly.
[0533] 96. The pharmaceutical composition for use according to embodiment 95, wherein the pharmaceutical composition is administered intravenously.
[0534] 97. The pharmaceutical composition for use according to embodiment 95, wherein the pharmaceutical composition is administered intramuscularly.
[0535] 98. The pharmaceutical composition for use according to any one of embodiments 79-97, wherein the pharmaceutical composition is administered at least once.
[0536] 99. The pharmaceutical composition for use according to embodiment 98, wherein the pharmaceutical composition is administered at least twice.
[0537] 100. The pharmaceutical composition for use according to embodiment 99, wherein the period between administrations is at least 2 weeks, e.g. 3 weeks, or 1 month.
[0538] 101. A SARS-COV-2 antigen, wherein the SARS-COV-2 antigen is a polypeptide comprising or consisting of the amino acid sequence of SEQ ID NO: 1.
[0539] 102. A SARS-COV-2 antigen, wherein the SARS-COV-2 antigen is a polypeptide comprising or consisting of the amino acid sequence of SEQ ID NO: 10.
[0540] 103. A SARS-COV-2 antigen, wherein the SARS-COV-2 antigen is a polypeptide comprising or consisting of the amino acid sequence of SEQ ID NO: 9.
[0541] 104. A SARS-COV-2 antigen, wherein the SARS-COV-2 antigen is a polypeptide comprising or consisting of the amino acid sequence of SEQ ID NO: 11.
[0542] 105. A SARS-COV-2 antigen, wherein the SARS-COV-2 antigen is a polypeptide comprising or consisting of the amino acid sequence of SEQ ID NO:2.
[0543] 106. A SARS-COV-2 antigen, wherein the SARS-COV-2 antigen is a polypeptide comprising or consisting of the amino acid sequence of SEQ ID NO:12.
[0544] 107. A SARS-COV-2 antigen, wherein the SARS-COV-2 antigen is a polypeptide comprising or consisting of the amino acid sequence of SEQ ID NO:3.
[0545] 108. A SARS-COV-2 antigen, wherein the SARS-COV-2 antigen is a polypeptide comprising or consisting of the amino acid sequence of SEQ ID NO:8.
[0546] 109. A SARS-COV-2 antigen, wherein the SARS-COV-2 antigen is a polypeptide comprising or consisting of the amino acid sequence of SEQ ID NO:20.
[0547] 110. A SARS-COV-2 antigen, wherein the SARS-COV-2 antigen is a polypeptide comprising or consisting of the amino acid sequence of SEQ ID NO: 17.
[0548] 111. A SARS-COV-2 antigen, wherein the SARS-COV-2 antigen is a polypeptide comprising or consisting of the amino acid sequence of SEQ ID NO: 14.
[0549] 112. A SARS-COV-2 antigen, wherein the SARS-COV-2 antigen is a polypeptide comprising or consisting of the amino acid sequence of SEQ ID NO:16.
[0550] 113. A SARS-COV-2 antigen, wherein the SARS-COV-2 antigen is a polypeptide comprising or consisting of the amino acid sequence of SEQ ID NO:66.
[0551] 114. A SARS-COV-2 antigen, wherein the SARS-COV-2 antigen is a polypeptide comprising or consisting of the amino acid sequence of SEQ ID NO:15.
[0552] 115. A SARS-COV-2 antigen, wherein the SARS-COV-2 antigen is a polypeptide comprising or consisting of the amino acid sequence of SEQ ID NO:82.
[0553] 116. A SARS-COV-2 antigen, wherein the SARS-COV-2 antigen is a polypeptide comprising or consisting of the amino acid sequence of SEQ ID NO:84.
[0554] 117. A SARS-COV-2 antigen, wherein the SARS-COV-2 antigen is a polypeptide comprising or consisting of the amino acid sequence of SEQ ID NO:74.
[0555] 118. A SARS-COV-2 antigen, wherein the SARS-COV-2 antigen is a polypeptide comprising or consisting of the amino acid sequence of SEQ ID NO:76.
[0556] 119. A SARS-COV-2 antigen, wherein the SARS-COV-2 antigen is a polypeptide comprising or consisting of the amino acid sequence of SEQ ID NO:78.
[0557] 120. A SARS-COV-2 antigen, wherein the SARS-COV-2 antigen is a polypeptide comprising or consisting of the amino acid sequence of SEQ ID NO:80.
[0558] 121. A SARS-COV-2 antigen, wherein the SARS-COV-2 antigen is a polypeptide comprising or consisting of the amino acid sequence of SEQ ID NO:68.
[0559] 122. A SARS-COV-2 antigen, wherein the SARS-COV-2 antigen is a polypeptide comprising or consisting of the amino acid sequence of SEQ ID NO:70.
[0560] 123. A SARS-COV-2 antigen, wherein the SARS-COV-2 antigen is a polypeptide comprising or consisting of the amino acid sequence of SEQ ID NO:96.
[0561] 124. A SARS-COV-2 antigen, wherein the SARS-COV-2 antigen is a polypeptide comprising or consisting of the amino acid sequence of SEQ ID NO:86.
[0562] 125. A SARS-COV-2 antigen, wherein the SARS-COV-2 antigen is a polypeptide comprising or consisting of the amino acid sequence of SEQ ID NO:88.
[0563] 126. A SARS-COV-2 antigen, wherein the SARS-COV-2 antigen is a polypeptide comprising or consisting of the amino acid sequence of SEQ ID NO:90.
[0564] 127. A SARS-COV-2 antigen, wherein the SARS-COV-2 antigen is a polypeptide comprising or consisting of the amino acid sequence of SEQ ID NO:92.
[0565] 128. A SARS-COV-2 antigen, wherein the SARS-COV-2 antigen is a polypeptide comprising or consisting of the amino acid sequence of SEQ ID NO:94.
[0566] 129. A SARS-COV-2 antigen, wherein the SARS-COV-2 antigen is a polypeptide comprising or consisting of the amino acid sequence of SEQ ID NO: 118.
[0567] 130. A SARS-COV-2 antigen, wherein the SARS-COV-2 antigen is a polypeptide comprising or consisting of the amino acid sequence of SEQ ID NO: 120.
[0568] 131. A SARS-COV-2 antigen, wherein the SARS-COV-2 antigen is a polypeptide comprising or consisting of the amino acid sequence of SEQ ID NO: 123.
[0569] 132. A SARS-COV-2 antigen, wherein the SARS-COV-2 antigen is a polypeptide comprising or consisting of the amino acid sequence of SEQ ID NO: 125.
[0570] 133. A SARS-COV-2 antigen, wherein the SARS-COV-2 antigen is a polypeptide comprising or consisting of the amino acid sequence of SEQ ID NO: 127.
[0571] 134. A SARS-COV-2 antigen, wherein the SARS-COV-2 antigen is a polypeptide comprising or consisting of the amino acid sequence of SEQ ID NO: 129.
[0572] 135. A SARS-COV-2 antigen, wherein the SARS-COV-2 antigen is a polypeptide comprising or consisting of the amino acid sequence of SEQ ID NO: 131.
[0573] 136. A SARS-COV-2 antigen, wherein the SARS-COV-2 antigen is a polypeptide comprising or consisting of the amino acid sequence of SEQ ID NO: 133.
[0574] 137. A SARS-COV-2 antigen, wherein the SARS-COV-2 antigen is a polypeptide comprising or consisting of the amino acid sequence of SEQ ID NO: 135.
[0575] 138. A SARS-COV-2 antigen, wherein the SARS-COV-2 antigen is a polypeptide comprising or consisting of the amino acid sequence of SEQ ID NO: 139.
[0576] 139. A SARS-COV-2 antigen, wherein the SARS-COV-2 antigen is a polypeptide comprising or consisting of the amino acid sequence of SEQ ID NO: 141.
[0577] 140. A peptide fusion construct comprising one or more antigenic regions of the SARS-COV-2 S protein, where the one or more antigenic regions comprises or consists of the following components: FP, D1, D2 and/or B1, wherein FP comprises residues 815-833 of the SARS-COV-2 S protein, wherein D1 comprises residues 820-846 of the SARS-COV-2 S protein, wherein D2 comprises residues 1078-1111 of the SARS-COV-2 S protein, and wherein B1 comprises residues 798-829 of the SARS-COV-2 S protein.
[0578] 141. The peptide fusion construct according to embodiment 140, wherein the peptide fusion construct has the following structure: D1-linker-FP-linker-D2-linker-D1,
[0579] 142. The peptide fusion construct according to embodiment 141, wherein DI has the sequence of SEQ ID NO: 22.
[0580] 143. The peptide fusion construct according to embodiment 140 or 141, wherein FP has the sequence of SEQ ID NO: 21
[0581] 144. The peptide fusion construct according to any one of embodiments 140, 141 and 142, wherein the linker comprises or consists of the amino acid sequence GGGGS.
[0582] 145. The peptide fusion construct according to any one of embodiments 140-144, comprising or consisting of the sequence of SEQ ID NO: 25 or 51, 55,
[0583] 146. The peptide fusion construct according to embodiment 140, wherein the peptide fusion construct has the following structure: FP-linker-FP-linker-FP, D1-linker-D1-linker-D1, or FP/D1-linker-FP/D1-linker-FP/D1.
[0584] 147. The peptide fusion construct according to embodiment 146, wherein the FP/D1 portion has the sequence of SEQ ID NO: 99.
[0585] 148. The peptide fusion construct according to embodiment 146 or 147, wherein the linker comprises or consists of the amino acid sequence GGGGS.
[0586] 149. The peptide fusion construct according to any one of embodiments 146-148, comprising or consisting of the sequence of SEQ ID NO: 27 or 53, 57.
[0587] 150. A pharmaceutical composition comprising the SARS-COV-2 antigen of any one of embodiments 101-131 or the peptide fusion construct of any one of embodiments 146-149.
[0588] 151. The pharmaceutical composition of embodiment 150, further comprising an adjuvant.
[0589] 152. The pharmaceutical composition of embodiment 151, wherein the adjuvant is selected from alum, CpG, PolyI: C, MF59, AS01, AS02, AS03, AS04, AF03, flagellin, ISCOMs and ISCOMMATRIX.
[0590] 153. The pharmaceutical composition of any one of embodiments 150-152 for use in treating or preventing an infection with SARS-COV-2.
[0591] 154. The pharmaceutical composition for use according to embodiment 153, wherein the pharmaceutical composition is administered parenterally.
[0592] 155. The pharmaceutical composition for use according to embodiment 154, wherein the pharmaceutical composition is administered intradermally, subcutaneously, or intramuscularly.
[0593] 156. The pharmaceutical composition for use according to embodiment 155, wherein the pharmaceutical composition is administered intramuscularly.
[0594] 157. The pharmaceutical composition for use according to any one of embodiments 153-156, wherein the pharmaceutical composition is administered at least once.
[0595] 158. The pharmaceutical composition for use according to embodiments 153-156, wherein the pharmaceutical composition is administered at least twice.
[0596] 159. The pharmaceutical composition for use according to embodiments 158, wherein the period between administrations is at least 2 weeks, e.g. 3 weeks, or 1 month.
[0597] 160. An mRNA construct consisting of the following structural elements:
[0598] (i) a 5′ cap with the following structure:

[chemical structure]

[0599] (ii) a 5′ untranslated region (5′ UTR) having the nucleic acid sequence of SEQ ID NO: 144;
[0600] (iii) a protein coding region having the nucleic acid sequence of SEQ ID NO: 148;
[0601] (iv) a 3′ untranslated region (3′ UTR) having the nucleic acid sequence of SEQ ID NO: 145; and
[0602] (v) a poly A tail.
[0603] 161. A lipid nanoparticle encapsulating the mRNA construct of embodiment 160.
[0604] 162. The lipid nanoparticle of embodiment 161, wherein the lipid nanoparticle comprises a cationic lipid, a non-cationic lipid, a cholesterol-based lipid and a PEG-modified lipid.
[0605] 163. The lipid nanoparticle of embodiment 161 or 162, wherein the cationic lipid is selected from cKK-E12, cKK-E10, OF-Deg-Lin and OF-02; the non-cationic lipid is selected from DOPE and DEPE; the cholesterol-based lipid is cholesterol; and the PEG-modified lipid is DMG-PEG-2K.
[0606] 164. An immunogenic composition comprising the mRNA construct of embodiment 160 or the lipid nanoparticle of any of embodiments 161-163.
[0607] 165. The immunogenic composition according to embodiment 164 comprising between 10 μg and 200 μg of the mRNA construct.
[0608] 166. The immunogenic composition according to embodiment 165 comprising between 15 μg and 135 μg of the mRNA construct.
[0609] 167. The immunogenic composition according to embodiment 166 comprising at least 20 μg of the mRNA construct.
[0610] 168. The immunogenic composition according to embodiment 166 comprising at least 25 μg of the mRNA construct.
[0611] 169. The immunogenic composition according to embodiment 166 comprising at least 35 μg of the mRNA construct.
[0612] 170. The immunogenic composition according to embodiment 166 comprising at least 40 μg of the mRNA construct.
[0613] 171. The immunogenic composition according to embodiment 166 comprising at least 45 μg of the mRNA construct.
[0614] 172. The immunogenic composition according to embodiment 166 comprising 15 μg, 45 μg or 135 μg of the mRNA construct.
[0615] 173. A method of treating or preventing a SARS-COV-2 infection, said method comprising administering to a subject an effective amount of the immunogenic composition of any one of embodiments 164 to 172.
[0616] 174. The method of embodiment 173, wherein the immunogenic is administered to the subject at least twice.
[0617] 175. The method of embodiment 174, wherein the period between administrations is at least 2 weeks, e.g., 3 weeks, or 1 month.
[0618] 176. An immunogenic composition comprising at least two nucleic acids, for use in prophylaxis of an infection with SARS-COV-2, wherein a first nucleic acid comprises an optimized nucleotide sequence which encodes an amino acid sequence comprising a sequence selected from SEQ ID NO: 1, 2, 3, 4, 5, 8, 9, 10, 11, 12, 14, 15, 16, 17, 19, 20, 35, 66, 68, 70, 72, 74, 76, 78, 80, 82, 84. 86, 88, 90, 92, 94, 96, 98, 104, 106, 108, 110, 118, 120, 123, 125, 127, 129, 131, 133, 135, 137, 139 or 141, and wherein one or more further nucleic acid(s) comprise(s) an optimized nucleotide sequence which encodes an amino acid sequence comprising a sequence selected from SEQ ID NO: 151, 153, 155, 157, 159, 161, 163, 165, 167, 169 or 171.
[0619] 177. An immunogenic composition comprising at least two nucleic acids, for use in prophylaxis of an infection with SARS-COV-2, wherein a first nucleic acid comprises an optimized nucleotide sequence which encodes an amino acid sequence comprising SEQ ID NO: 11, optionally wherein the optimized nucleotide sequence has the nucleic acid sequence of SEQ ID NO: 44, and
[0620] wherein one or more further nucleic acid(s) is (are) selected from:
   [0621] (a) a nucleic acid comprising an optimized nucleotide sequence which encodes an amino acid sequence comprising a sequence selected from SEQ ID NO: 157, optionally wherein the optimized nucleotide sequence has the nucleic acid sequence of SEQ ID NO 156, and
   [0622] (b) nucleic acid comprises an optimized nucleotide sequence that encodes an amino acid sequence comprising a sequence selected from SEQ ID NO: 163, optionally wherein the optimized nucleotide sequence has the nucleic acid sequence of SEQ ID NO: 162; and
   [0623] (c) nucleic acid comprises an optimized nucleotide sequence that encodes an amino acid sequence comprising a sequence selected from SEQ ID NO: 167, optionally wherein the optimized nucleotide sequence has the nucleic acid sequence of SEQ ID NO: 166; and
   [0624] (d) nucleic acid comprises an optimized nucleotide sequence that encodes an amino acid sequence comprising a sequence selected from SEQ ID NO: 171, optionally wherein the optimized nucleotide sequence has the nucleic acid sequence of SEQ ID NO 170.
[0625] 178. The immunogenic composition according to embodiment 176 or embodiment 177, wherein the at least two nucleic acids are mRNA.
[0626] 179. The immunogenic composition according to embodiment 178, wherein the first nucleic acid comprises an optimized nucleotide sequence which encodes an amino acid sequence comprising SEQ ID NO:11 and wherein the optimized nucleotide sequence has the nucleic acid sequence of SEQ ID NO: 148.
[0627] 180. The immunogenic composition according to embodiments 176-178, wherein the nucleic acids are encapsulated in a lipid nanoparticle.
[0628] 181. A method of treating or preventing a SARS-COV-2 infection, said method comprising administering to a subject an effective amount of the immunogenic composition of any one of embodiments 176-179.

### EXAMPLES

### Example 1. Generating Optimized Nucleotide Sequences

[0629] This example illustrates a process that results in optimized nucleotide sequences in accordance with the invention that are optimized to yield full-length transcripts during in vitro synthesis and result in high levels of expression of the encoded protein.

[0630] The process combines the codon optimization method of FIG. 1A with a sequence of filtering steps illustrated in FIG. 1B to generate a list of optimized nucleotide sequences. Specifically, as illustrated in FIG. 1A, the process receives an amino acid sequence of interest and a first codon usage table which reflects the frequency of each codon in a given organism (namely human codon usage preferences in the context of the present example). The process then removes codons from the first codon usage table if they are associated with a codon usage frequency which is less than a threshold frequency (10%). The codon usage frequencies of the codons not removed in the first step are normalized to generate a normalized codon usage table.

[0631] Normalizing the codon usage table involves re-distributing the usage frequency value for each removed codon; the usage frequency for a certain removed codon is added to the usage frequencies of the other codons with which the removed codon shares an amino acid. In this example, the re-distribution is proportional to the magnitude of the usage frequencies of the codons not removed from the table. The process uses the normalized codon usage table to generate a list of optimized nucleotide sequences. Each of the optimized nucleotide sequences encode the amino acid sequence of interest.

[0632] As illustrated in FIG. 1B, the list of optimized nucleotide sequences is further processed by applying a motif screen filter, guanine-cytosine (GC) content analysis filter, and codon adaptation index (CAI) analysis filter, in that order, to generate an updated list of optimized nucleotide sequences.

[0633] As illustrated in following examples, this process results in optimized nucleotide sequences encoding the amino acid sequence of interest. The nucleotide sequences yield full-length transcripts during in vitro synthesis and result in high levels of expression of the encoded protein (see Example 2).

### Example 2. Codon Optimization to Generate Nucleotide Sequences with a High CAI Score Improves Protein Yield

[0634] This example demonstrates that codon-optimized protein coding sequences with a codon adaptation index (CAI) of about 0.8 or higher outperform codon-optimized protein coding sequences with a CAI below 0.8.

[0635] Codon optimization was performed on a wild-type amino acid sequence of human erythropoietin (hEPO). hEPO is a protein hormone secreted by the kidney in response to low cellular oxygen levels (hypoxia). hEPO is essential for erythropoiesis, the production of red blood cells. Recombinant hEPO is commonly used in the treatment of anemia, a condition characterized by a low red blood cell or hemoglobin count, which can occur in subjects with chronic kidney disease or in subjects undergoing cancer chemotherapy.

[0636] Using different codon optimization algorithms, a total of 5 new codon-optimized nucleotide sequences encoding hEPO (#1 through #5) were generated. Nucleotide sequences #4 and #5 were generated according to a codon optimization method as illustrated in FIGS. 1A and 1B. As a reference, a nucleotide sequence with a codon-optimized hEPO coding sequence was provided that had previously been validated experimentally both in vitro and in vivo. The reference nucleotide sequence had been found to provide superior protein yield relative to the wild-type nucleotide sequence and other codon-optimized nucleotide sequences encoding the hEPO protein.

TABLE 5
hEPO-encoding nucleotide sequences

| | |
|---|---|
| SEQ ID NO: 112 | ATGGGTGTGCACGAATGTCCTGCTTGGCTGTGGCTCCTTCTCTC |
| | CCTGCTGTCCCTGCCTCTTGGACTCCCGGTGCTTGGAGCACCCC |
| | CGAGACTGATCTGCGACAGCAGGGTGCTCGAGCGCTACCTCCT |
| | GGAAGCCAAGGAAGCCGAAAACATCACTACTGGCTGCGCCGA |
| | ACACTGCTCCCTGAACGAGAACATCACCGTGCCGGACACCAAG |
| | GTCAACTTCTACGCGTGGAAGAGAATGGAGGTCGGACAGCAA |
| | GCCGTGGAAGTGTGGCAGGGACTTGCGCTCCTGTCGGAAGCCG |
| | TGCTGAGGGGACAAGCCCTGCTCGTGAACAGCTCACAGCCTTG |
| | GGAGCCCCTGCAGCTGCATGTCGACAAGGCCGTGTCCGGACTG |
| | CGCTCACTGACCACTCTGCTGAGGGCCTTGGGTGCCCAGAAAG |
| | AGGCTATTTCCCCACCGGATGCAGCCTCGGCAGCTCCTCTGCG |
| | GACCATTACGGCGGACACCTTTCGGAAGCTGTTCCGCGTCTAC |
| | AGCAATTTCCTCCGGGGGAAGTTGAAACTGTATACCGGCGAAG |
| | CCTGTCGGACTGGCGATCGCTGA |
| SEQ ID NO: 113 | ATGGGGGTTCATGAGTGCCCAGCTTGGCTTTGGCTCCTGCTCAG |
| | CTTGCTTAGTCTCCCTTTGGGCCTGCCCGTGCTGGGCGCCCCTC |
| | CACGCTTGATCTGTGACAGCAGGGTCTTGGAACGGTATTTGCTT |
| | GAAGCTAAAGAAGCTGAGAACATAACAACGGGATGTGCTGAA |
| | CATTGCTCCTTGAACGAAAACATCACAGTTCCCGACACAAAAG |
| | TCAATTTTTACGCATGGAAGCGGATGGAGGTTGGCCAGCAAGC |
| | TGTGGAGGTCTGGCAAGGGCTGGCTCTTCTCAGTGAAGCCGTG |
| | CTGCGCGGACAAGCACTCTTGGTGAACTCCAGCCAGCCCTGGG |
| | AGCCCCTTCAGCTCCATGTCGATAAAGCAGTTAGCGGCCTCCG |
| | ATCATTGACTACCCTCCTTAGGGCTTTGGGTGCACAAAAAGAG |
| | GCCATTTCACCACCGGACGCGGCAAGTGCTGCTCCGTTGCGAA |
| | CTATAACTGCTGACACCTTCCGGAAACTTTTTCGGGTATATTCC |
| | AACTTTCTCAGGGGGAAACTCAAGCTCTACACCGGCGAGGCGT |
| | GCCGAACTGGAGACCGCTGA |
| SEQ ID NO: 114 | ATGGGCGTACATGAATGCCCGGCATGGCTTTGGCTGCTGCTGT |
| | CCCTGCTGAGTTTGCCGCTGGGCCTCCCCGTCCTCGGCGCTCCC |
| | CCGAGACTCATTTGCGACTCTAGGGTCCTCGAACGCTATCTGCT |
| | GGAAGCAAAAGAAGCTGAGAACATAACTACAGGATGCGCTGA |
| | GCACTGTTCCTTGAATGAGAATATCACAGTACCTGACACTAAG |
| | GTGAATTTTTACGCATGGAAACGCATGGAAGTGGGTCAGCAGG |
| | CCGTGGAAGTGTGGCAGGGCCTGGCGCTGCTGTCCGAGGCTGT |
| | TCTTAGAGGCCAAGCCTTGTTGGTCAATTCCTCTCAACCCTGGG |
| | AGCCCCTCCAGCTGCATGTTGATAAAGCCGTCTCTGGTCTCCGG |
| | TCCCTTACCACCCTGCTCAGGGCACTTGGCGCACAGAAGGAAG |
| | CTATCTCCCCCCCAGACGCTGCCAGTGCCGCCCCCCTCCGGACT |
| | ATTACCGCCGATACTTTCAGGAAACTGTTTCGAGTCTATAGCAA |
| | TTTTCTCCGCGGGAAACTGAAGCTGTATACAGGTGAGGCCTGC |
| | AGGACAGGAGATCGCTGA |
| SEQ ID NO: 115 | ATGGGCGTGCACGAATGTCCTGCTTGGCTGTGGCTGCTGCTGA |
| | GTCTGCTGTCTCTGCCTCTGGGACTGCCTGTTCTTGGAGCCCCT |
| | CCTAGACTGATCTGCGACAGCAGAGTGCTGGAAAGATACCTGC |
| | TGGAAGCCAAAGAGGCCGAGAACATCACAACAGGCTGTGCCG |
| | AGCACTGCAGCCTGAACGAGAATATCACCGTGCCTGACACCAA |
| | AGTGAACTTCTACGCCTGGAAGCGGATGGAAGTGGGACAGCA |
| | GGCTGTGGAAGTTTGGCAAGGACTGGCCCTGCTGTCTGAAGCT |
| | GTTCTGAGAGGACAGGCTCTGCTGGTCAATAGCTCTCAGCCTT |
| | GGGAACCTCTCCAGCTGCATGTGGATAAGGCCGTGTCTGGCCT |
| | GAGAAGCCTGACAACACTGCTGAGAGCCCTGGGAGCCCAGAA |
| | AGAGGCCATTTCTCCACCTGATGCTGCCAGCGCTGCCCCTCTGA |
| | GAACAATCACCGCCGACACCTTCAGAAAGCTGTTCCGGGTGTA |
| | CAGCAACTTCCTGCGGGGCAAGCTGAAACTGTACACCGGCGAA |
| | GCCTGCAGAACCGGCGATAGATAA |
| SEQ ID NO: 116 | ATGGGGGTGCACGAGTGCCCTGCCTGGCTGTGGTTGCTGCTGT |
| | CCCTGCTGTCTCTGCCACTGGGACTGCCAGTGCTGGGAGCTCCA |
| | CCTAGGCTGATCTGCGACAGCCGGGTCCTGGAGAGGTACCTGC |
| | TCGAGGCCAAGGAGGCCGAGAACATTACCACAGGCTGCGCCG |
| | AGCACTGCAGCCTGAACGAGAACATTACAGTGCCCGATACAAA |
| | GGTGAACTTCTACGCCTGGAAGAGGATGGAGGTGGGCCAGCA |
| | GGCCGTGGAGGTGTGGCAGGGGCTGGCCCTGCTGAGCGAGGCC |
| | GTGCTGAGGGGCCAAGCCCTGCTGGTCAACAGCAGCCAGCCTT |
| | GGGAGCCCCTGCAGCTCCACGTGGACAAGGCTGTGTCTGGCTT |
| | GAGGTCTCTCACAACATTGCTGAGGGCCCTGGGCGCACAGAAA |
| | GAAGCTATCAGCCCACCTGATGCCGCTAGTGCCGCTCCACTGC |
| | GGACAATTACCGCCGATACCTTTAGAAAATTGTTCAGGGTCTA |
| | CTCCAACTTTTTGCGCGGGAAGCTGAAGCTCTATACCGGCGAG |
| | GCCTGCCGGACAGGGGACAGATGA |
| SEQ ID NO: 117 | ATGGGAGTGCACGAATGTCCTGCATGGCTCTGGCTCCTGCTGTC |
| | TCTCCTGAGCCTGCCACTGGGACTCCCAGTGCTGGGAGCACCC |
| | CCTAGGCTGATCTGCGATTCTCGGGTGCTGGAGCGCTACCTGCT |
| | CGAGGCTAAGGAGGCCGAGAATATCACTACTGGGTGTGCCGAA |
| | CACTGTAGCCTCAATGAAAACATTACAGTCCCAGATACCAAGG |
| | TGAACTTTTATGCATGGAAGAGGATGGAGGTCGGGCAGCAGGC |
| | AGTGGAGGTGTGGCAGGGACTGGCTCTGCTGTCCGAAGCCGTG |
| | CTCAGAGGTCAGGCCCTGCTGGTTAATTCCAGCCAGCCTTGGG |
| | AACCTCTGCAGCTGCATGTGGACAAGGCAGTGTCTGGCCTGAG |
| | ATCCCTTACTACACTGCTGAGAGCACTGGGGGCTCAGAAAGAA |
| | GCTATTTCCCCACCAGACGCCGCCTCAGCAGCACCTCTCCGGA |
| | CCATCACTGCTGACACCTTCCGCAAGCTCTTTAGGGTGTACTCC |
| | AACTTCCTGCGCGGGAAGCTCAAGCTGTACACCGGCGAAGCCT |
| | GCAGGACCGGGGATCGCTGA |

[0637] The characteristics of each of the 5 nucleotide sequences in terms of CAI, GC content, codon frequency distribution (CFD) as well as the presence of negative CIS elements and negative repeat elements is summarized in Table 6.

TABLE 6
Characteristics of the optimized nucleotide
sequences encoding hEPO

| | | | GC | | Negative | Negative |
|---|---|---|---|---|---|---|
| Nucleotide | | | content | CFD | CIS | repeat |
| Sequence | SEQ ID NO. | CAI | % | % | elements | elements |
| Reference | SEQ ID NO: | 0.79 | 61.06% | 3% | 0 | 0 |
| | 112 | | | | | |
| #1 | SEQ ID NO: | 0.69 | 54.12% | 2% | 0 | 0 |
| | 113 | | | | | |
| #2 | SEQ ID NO: | 0.76 | 56.23% | 1% | 0 | 0 |
| | 114 | | | | | |
| #3 | SEQ ID NO: | 0.90 | 57.28% | 0% | 0 | 0 |
| | 115 | | | | | |
| #4 | SEQ ID NO: | 0.89 | 60.95% | 0% | 0 | 0 |
| | 116 | | | | | |
| #5 | SEQ ID NO: | 0.86 | 59.56% | 0% | 0 | 0 |
| | 117 | | | | | |

[0638] In order to test the protein yield from each of the codon-optimized sequences, 6 nucleic acid vectors were prepared each comprising an expression cassette that contained one of the 6 nucleotide sequences encoding the hEPO protein flanked by identical 3′ and 5′ untranslated sequences (3′ and 5′ UTRs) and preceded by an RNA polymerase promoter. These nucleic acid vectors served as templates for in vitro transcription reactions to provide 6 batches of mRNA containing the 6 codon-optimized nucleotide sequences (reference and nucleotide sequences #1 through #5). Capping and tailing were performed separately. Each of the capped and tailed mRNAs were separately transfected into a cell line (HEK293). Expression levels of the encoded hEPO protein was assessed by ELISA. The results of this experiment are summarized in FIG. 2.

[0639] As can be seen from FIG. 2, the highest level of expression was observed with nucleotide sequence #3, which yielded nearly twice as much hEPO protein as the experimentally validated reference nucleotide sequence. A trend towards higher protein yield could be observed for sequences depending on their CAI (cf. Table 6). Nucleotide sequence #3 with the highest protein yield had the highest CAI. The second and third highest yielding nucleotide sequences #4 and #5 had the third and fourth highest CAI. The lowest performing nucleotide sequences #1 and #2 also had the lowest CAI. Incidentally, these were also the nucleotide sequences with the lowest GC content. However, GC content alone was not determinative. The reference nucleotide sequence had the highest GC content (61%) of all tested codon-optimized sequences, but did not perform as well as nucleotide sequences #3, #4 and #5, all of which had a lower GC content. Notably, the lowest performing nucleotide sequences #1 and #2 also had a higher CFD.

[0640] Taken together, the data in this example demonstrate that codon optimization of a therapeutically relevant nucleotide sequence to achieve a CAI of about 0.8 or higher results in greater protein yield than, e.g., codon optimization to achieve a nucleotide sequence with the highest possible GC content.

### Example 3. Detection of Spike Proteins Produced Using Optimized Nucleic Constructs

[0641] This example demonstrates that optimized nucleotide sequences encoding a full-length SARS-COV-2 S protein are successfully expressed in cultured cells at high levels following transfection. It also demonstrates that the expressed protein is processed by the cells as expected.

[0642] Nucleic acid constructs comprising optimized nucleotide sequences encoding a full-length SARS-COV-2 S protein were generated according to a codon optimization method as illustrated in FIGS. 1A and 1B. The optimized nucleotide sequences are shown in Table 7.

TABLE 7
Nucleic acids comprising an optimized nucleotide
sequence encoding a SARS-CoV-2 S protein

| Construct | Optimized nucleic | Amino acid | |
|---|---|---|---|
| No. | acid sequence | sequence | Protein description |
| A | SEQ ID NO: 29 | SEQ ID NO: 1 | Native full-length SARS-CoV-2 spike |
| | | | protein |
| B | SEQ ID NO: 44 | SEQ ID NO: 11 | SARS-CoV-2 S protein that has been |
| | | | modified relative to naturally |
| | | | occurring SARS-CoV-2 spike protein to |
| | | | remove the furin cleavage site and to |
| | | | mutate residues 986 and 987 to proline |
| C | SEQ ID NO: 43 | SEQ ID NO: 10 | SARS-CoV-2 S protein that has been |
| | | | modified relative to naturally occurring |
| | | | SARS-CoV-2 spike protein to mutate |
| | | | residues 986 and 987 to proline |
| D | SEQ ID NO: 42 | SEQ ID NO: 9 | SARS-CoV-2 S protein that has been |
| | | | modified relative to naturally occurring |
| | | | SARS-CoV-2 spike protein to remove |
| | | | the furin cleavage site |

[0643] For transfection of cultured cells, 150 μL OptiMEM Reduced Serum Medium was added to a 1.5 mL Eppendorf tube, along with 0.5 μg (FIG. 7) or 1 μg (FIGS. 5 and 6) mRNA and 2.5 μL Lipofectamine 2000 for complexation of the mRNA to the transfection reagent. Each tube was gently mixed on a Vortex and spun briefly in a microcentrifuge to collect the contents. The complexes were incubated for 10±2 minutes at room temperature. Then the entire complex volume was carefully added to a well of a 12 well plate, so as not to disturb the HEK293 cell monolayer (5×10⁵ per well). The cells were returned to a 37° C. incubator and incubated for 18±2 hours prior to harvesting.

[0644] The contents of each well was harvested by removing the culture medium and adding 250 μL of CelLytic M (Sigma)+1× HALT. The cell suspension was left for 20 minutes on ice to allow the cells to fully lyse, before the lysates were collected in 1.5 mL Eppendorf tubes. The lysates were centrifuged at 13,000 RPM for 3 minutes to pellet the debris. The supernatants were transferred to clean 1.5 mL Eppendorf tubes. From this point forward, samples were always kept on ice.

[0645] For Western Blotting, 15 μL of each cell lysate was combined with 5 μL 4× Novex NuPAGE LDS Sample Buffer supplemented with 1× NuPage Sample Reducing Agent. The samples were incubated at 85° C. for 5 minutes, then cooled on ice. The entire sample volume was loaded into a Novex WedgeWell 12-well 6% tris-glycine mini gel with 3 μg I-56578SS/gel and run for 1-1.5 hour at 165V. A TransBlot Turbo with the PVDF transfer pack was used for transfer and the membranes were blocked in 0.2% iBlock (Thermo) with 0.05% Tween-20 in 1×PBS. The membranes were incubated for ≥1 hour with primary antibody (Anti-rabbit HRP #W401B) diluted as specified in blocking buffer. They were then washed twice with 1×TBST (Thermo). The membranes were then incubated for ≥1 hour with species-appropriate secondary antibody diluted 1:10,000 in blocking buffer. They were then washed four times with 1×TBST. The membranes were then develop using SuperSignal Pico West substrate on film.

[0646] Transfection of mRNAs containing the optimized nucleotide sequences described in Table 7 resulted in levels of protein expression in cultured HEK293 cells. FIGS. 5 and 6 show a ˜170-180 kDa band corresponding to a pre-processed full length S protein. FIG. 5 also shows the presence of S1 and S2 subunit bands, demonstrating that the native full length SARS-COV-2 S protein (Construct A) is processed correctly by the cells. A large band corresponding to fully glycosylated mature protein was observed when cells expressed construct B. Construct B encodes a variant SARS-COV-2 S protein that is modified relative to naturally occurring SARS-COV-2 spike protein to lack the furin cleavage site (and therefore is not cleaved to form the S1 and S2 subunits) and to contain prolines as residues 986 and 987 (thereby stabilizing the protein in its prefusion conformation).

[0647] FIG. 7 also shows the full length S protein band of ˜170-180 kDa. This band was observed with all 4 constructs tested. S1 and S2 subunit bands were detected with construct A and construct C. Construct C expresses a variant SARS-COV-2 S protein which is modified relative to naturally occurring SARS-COV-2 S protein to contain prolines as residues 986 and 987 (thereby stabilizing the protein in its prefusion conformation). Again, the fully glycosylated mature protein was detected as a strong band with construct B and construct D. Construct D encodes a variant SARS-COV-2 S protein that is modified relative to naturally occurring SARS-COV-2 S protein to lack the furin cleavage site (and therefore is not cleaved to form the S1 and S2 subunits).

[0648] This example demonstrates that optimized nucleic acid sequences encoding full length SARS-COV-2 S protein or variants thereof are expressed at high levels. It also demonstrates that the expressed protein is processed by the cells as expected.

### Example 4. Neutralizing Antibody Response to Immunization with Sequence-Optimized mRNAs Encoding a Full-Length Prefusion Stabilized SARS-COV-2 S Protein

[0649] This examples demonstrates that mRNAs comprising an optimized nucleotide sequence encoding a full-length prefusion stabilized SARS-COV-2 S protein are effective in inducing a neutralizing antibody response in mice.

[0650] Each of the four mRNAs containing the optimized nucleotide sequences described in Table 7 of Example 3 was encapsulated in lipid nanoparticles (LNPs). Groups of BALB/c mice were administered two immunizations at a 0.4 μg dose of one of the four formulations at a three week interval. Binding antibody activities in the serum samples were assessed via Enzyme-Linked Immunosorbent Assay (ELISA). To determine titers of neutralizing antibodies, a pseudovirus-based neutralization assay was used.

[0651] For the ELISA, 2019-nCOV Spike protein (S1+S2) ectodomain (Sino Biological, Cat #40589-V08B1) was used as substrate and coated at 2 μg/mL concentration in bicarbonate buffer overnight at 4° C. The plates were developed using colorimetric substrate, Sure Blue TMB 1-component (SERA CARE, KPL Cat #5120-0077), and stopped by Stop solution (SERA CARE Sure Blue, KPL Cat #5120-0024). The endpoint antibody titer for each sample was determined as the highest dilution which gave an OD value 3× higher than the background.

[0652] For the pseudovirus-based neutralization assay, serum samples were diluted 1:4 in medium (FluoroBrite phenol red free DMEM+10% FBS+10 mM HEPES+1% PS+1% Glutamax) and heat inactivated at 56° C. for 0.5 h. Further, 2-fold dilution series of the heat inactivated sera were prepared and mixed with the reporter virus particle (RVP)-GFP (Integral Molecular), diluted to contain 300 infectious particles per well and incubated for 1 h at 37° C. 96-well plates of 50% confluent 293T-hsACE2 clonal cells in 75 μL volume were inoculated with 50 μL of the serum/virus mixtures and incubated at 37° C. for 72h. At the end of the incubation, plates were scanned on a high-content imager and individual GFP expressing cells were counted. The inhibitory dilution titer (ID50) was reported as the reciprocal of the dilution that reduced the number of virus plaques in the test by 50%. ID50 for each test sample was interpolated by calculating the slope and intercept using the last dilution with a plaque number below the 50% neutralization point and the first dilution with a plaque number above the 50% neutralization point. ID50 Titer=(50% neutralization point−intercept)/slope.

[0653] All four mRNA formulations induced similar levels of binding antibodies 14 days after the first vaccination, and the responses were further enhanced one week after the second dose at Day 28. On Day 35, the geometric mean titers (GMTs) for neutralizing antibodies as determined by pseudovirus neutralization assay were 152 for construct A, 354 for construct B, 195 for construct C, and 1005 for construct D. The neutralizing potential of construct D variant was slightly trending higher than construct B.

[0654] Serological antibody titers detected for binding in ELISA were not predictive of neutralizing titers determined by pseudovirus. Some mice in the construct A and construct C groups did not seroconvert in the neutralization assay but their endpoint titration titers in ELISA were comparable to the others in the group. Constructs B and D were likely comparable in immunogenicity for induction of neutralizing antibodies.

[0655] This example demonstrates that mRNAs comprising an optimized nucleotide sequence encoding a full-length prefusion stabilized SARS-COV-2 S protein are more effective in inducing neutralizing antibody titers than an mRNA that encodes a native full-length SARS-COV-2 S protein. Blocking the furin cleavage site in addition to mutating residues 986 and 987 to proline adds another layer for prevention of prefusion to postfusion conversion. Considering the importance of the pre-fusion conformation, construct B (encoding a SARS-COV-2 S protein that has been modified relative to naturally occurring SARS-COV-2 S protein to remove the furin cleavage site and to mutate residues 986 and 987 to proline) was selected for further preclinical evaluations.

### Example 5. Preparation of mRNA-Encapsulating Lipid Nanoparticles

[0656] An mRNA comprising an optimized nucleotide sequence encoding a full-length SARS-COV-2 S protein that has been modified relative to naturally occurring SARS-COV-2 spike protein to remove the furin cleavage site and to mutate residues 986 and 987 to proline was synthesized in vitro. The mRNA was prepared using a template plasmid comprising the following nucleic acid sequence operable linked to an RNA polymerase promoter sequence:

| (SEQ ID NO: 149) | |
|---|---|
| 1 | GGACAGATCG CCTGGAGACG CCATCCACGC TGTTTTGACC TCCATAGAAG |
| 51 | ACACCGGGAC CGATCCAGCC TCCGCGGCCG GGAACGGTGC ATTGGAACGC |
| 101 | GGATTCCCCG TGCCAAGAGT GACTCACCGT CCTTGACACG ATGTTCGTCT |
| 151 | TCCTCGTGCT GCTCCCACTC GTTTCTTCCC AGTGTGTCAA CCTGACAACT |
| 201 | AGGACTCAGC TGCCACCAGC CTACACCAAC TCCTTCACCA GAGGCGTGTA |
| 251 | TTACCCAGAC AAGGTGTTTA GAAGCAGCGT GCTGCACTCT ACCCAGGACC |
| 301 | TCTTTCTGCC CTTTTTCAGC AACGTGACAT GGTTTCACGC AATTCACGTG |
| 351 | TCCGGCACTA ATGGCACAAA GCGGTTCGAC AATCCAGTCC TGCCTTTCAA |
| 401 | CGATGGCGTC TACTTTGCAT CTACTGAGAA ATCCAATATC ATTAGGGGAT |
| 451 | GGATCTTCGG CACAACCCTG GATTCTAAGA CCCAGAGCCT GCTGATCGTC |
| 501 | AACAACGCCA CAAACGTGGT CATTAAGGTT TGCGAGTTTC AGTTCTGTAA |
| 551 | CGATCCTTTT CTGGGCGTGT ATTATCATAA GAACAATAAG AGCTGGATGG |
| 601 | AGTCCGAGTT TAGAGTGTAT AGCTCTGCAA ATAATTGTAC CTTTGAGTAC |
| 651 | GTGAGCCAGC CCTTTCTGAT GGACCTGGAG GGAAAACAAG GAAACTTCAA |
| 701 | AAACCTGCGG GAATTCGTTT TCAAAAACAT CGACGGCTAT TTCAAGATCT |
| 751 | ATAGCAAGCA TACCCCAATC AACCTCGTGA GGGACCTCCC CCAGGGCTTT |
| 801 | AGCGCACTGG AGCCACTGGT TGACCTGCCT ATCGGCATTA ATATCACAAG |
| 851 | ATTTCAGACC CTGCTGGCAC TGCATAGAAG CTATCTGACC CCTGGAGACT |
| 901 | CCTCTAGTGG GTGGACTGCC GGCGCCGCTG CCTACTATGT GGGCTATCTG |
| 951 | CAGCCACGGA CATTCCTGCT GAAATACAAT GAGAACGGGA CAATCACAGA |
| 1001 | TGCTGTTGAT TGCGCACTCG ACCCCCTGTC CGAGACAAAG TGCACTCTCA |
| 1051 | AGAGCTTTAC CGTCGAGAAG GGCATCTATC AGACCTCAAA CTTCAGGGTG |
| 1101 | CAGCCCACAG AATCTATCGT GCGCTTCCCT AATATCACTA ACCTGTGTCC |
| 1151 | TTTCGGTGAA GTGTTCAACG CCACCAGGTT TGCTAGCGTG TATGCCTGGA |
| 1201 | ACAGGAAGAG GATCTCTAAC TGCGTCGCCG ACTATTCCGT GCTGTATAAC |
| 1251 | AGCGCCTCCT TCTCCACATT CAAATGCTAT GGAGTGAGCC CGACAAAACT |
| 1301 | GAACGATCTC TGCTTTACAA ATGTCTACGC CGACTCTTTT GTGATCAGAG |
| 1351 | GGGACGAGGT CCGGCAGATC GCACCAGGAC AGACAGGCAA GATTGCTGAC |
| 1401 | TACAACTATA AGCTGCCTGA CGACTTCACA GGATGTGTGA TCGCATGGAA |
| 1451 | CTCAAACAAT CTGGACTCCA AAGTCGGGGG CAACTATAAT TACCTGTATC |
| 1501 | GCCTGTTCCG GAAGTCCAAC CTGAAGCCCT TCGAGAGGGA CATCAGTACA |
| 1551 | GAGATCTATC AGGCTGGCTC CACCCCTTGC AATGGCGTCG AAGGCTTTAA |
| 1601 | TTGTTATTTT CCCCTGCAGT CTTACGGGTT TCAGCCTACT AATGGAGTTG |
| 1651 | GGTACCAGCC ATACAGAGTG GTCGTGCTCA GCTTCGAGCT CCTGCATGCT |
| 1701 | CCAGCTACAG TTTGCGGGCC AAAGAAGTCC ACTAACCTGG TGAAGAATAA |
| 1751 | GTGCGTCAAC TTCAACTTTA ACGGGCTCAC CGGCACCGGC GTGCTGACTG |
| 1801 | AGAGCAACAA GAAGTTTCTG CCATTTCAAC AGTTTGGACG GGACATTGCC |
| 1851 | GACACCACCG ATGCCGTTCG GGATCCACAG ACCCTGGAAA TTCTGGACAT |
| 1901 | TACACCGTGC AGCTTCGGGG GCGTGAGCGT GATCACACCC GGAACCAATA |
| 1951 | CAAGCAACCA GGTTGCCGTC CTGTATCAGG ATGTCAATTG CACAGAAGTG |
| 2001 | CCAGTTGCTA TCCACGCAGA CCAGCTGACT CCCACATGGC GGGTGTATAG |
| 2051 | CACCGGATCC AACGTGTTTC AGACCCGCGC CGGATGTCTC ATTGGGGCCG |
| 2101 | AGCACGTGAA TAACAGCTAC GAGTGCGACA TCCCCATTGG CGCCGGCATT |
| 2151 | TGTGCGTCTT ACCAGACTCA GACCAACTCT CCTGGCTCCG CCTCTTCCGT |
| 2201 | TGCTAGTCAG TCTATTATTG CCTATACCAT GAGCCTCGGA GCTGAGAATA |
| 2251 | GCGTGGCCTA CTCCAATAAT TCCATCGCAA TCCCTACTAA CTTCACTATT |
| 2301 | TCTGTGACCA CCGAGATCCT GCCTGTGTCT ATGACTAAGA CTAGCGTTGA |
| 2351 | TTGTACCATG TATATTTGTG GCGACTCTAC CGAATGTTCT AACCTGCTGC |
| 2401 | TTCAGTACGG CTCATTTTGC ACACAGCTGA ACAGAGCCCT GACTGGGATC |
| 2451 | GCTGTGGAGC AGGACAAGAA CACACAGGAG GTGTTTGCAC AGGTGAAGCA |
| 2501 | GATCTATAAG ACCCCTCCTA TTAAGGATTT CGGCGGATTC AATTTCTCAC |
| 2551 | AGATTCTGCC AGACCCCAGT AAGCCTTCCA AGAGGAGCTT CATCGAGGAT |
| 2601 | CTCCTGTTTA ACAAGGTGAC CCTGGCAGAC GCCGGCTTTA TTAAGCAATA |
| 2651 | TGGGGATTGC CTGGGCGACA TTGCTGCCAG AGACCTGATT TGCGCCCAGA |
| 2701 | AATTCAATGG CCTCACAGTG CTGCCACCTC TGCTGACCGA CGAGATGATC |
| 2751 | GCTCAATACA CTAGCGCACT GCTGGCCGGA ACCATCACAT CAGGCTGGAC |
| 2801 | CTTCGGGGCC GGAGCAGCAC TGCAGATTCC ATTCGCCATG CAGATGGCCT |
| 2851 | ATAGATTCAA CGGCATTGGC GTCACACAGA ACGTGCTGTA CGAAAACCAG |
| 2901 | AAGCTCATCG CTAACCAGTT TAATTCCGCA ATTGGAAAGA TCCAAGATTC |
| 2951 | ACTCAGCTCA ACCGCCTCTG CACTCGGAAA GCTGCAGGAC GTGGTCAACC |
| 3001 | AGAATGCTCA GGCCCTGAAC ACACTCGTCA AGCAGCTGTC CTCTAACTTT |
| 3051 | GGCGCTATCA GCTCCGTTCT GAACGACATT CTGAGCCGCC TGGATCCCCC |
| 3101 | AGAGGCTGAA GTCCAGATTG ACCGCCTGAT TACCGGCCGG CTGCAGTCTC |
| 3151 | TGCAAACATA CGTGACCCAG CAGCTGATCA GAGCAGCCGA GATCCGGGCA |
| 3201 | TCCGCAAATC TGGCAGCAAC TAAGATGAGC GAATGCGTGC TGGGCCAGTC |
| 3251 | CAAGCGGGTG GACTTTTGTG GCAAGGGCTA CCACCTGATG AGCTTCCCCC |
| 3301 | AGAGCGCCCC ACATGGCGTT GTTTTTCTGC ACGTGACCTA TGTCCCTGCT |
| 3351 | CAGGAAAAGA ACTTTACAAC TGCTCCTGCT ATCTGCCATG ACGGCAAGGC |
| 3401 | CCACTTCCCA CGGGAGGGAG TGTTTGTGTC CAATGGCACA CACTGGTTCG |
| 3451 | TGACCCAGAG GAACTTCTAT GAACCCCAGA TCATCACCAC TGACAATACC |
| 3501 | TTCGTGTCTG GAAATTGCGA CGTCGTGATC GGCATCGTTA ACAACACCGT |
| 3551 | GTACGACCCT CTCCAGCCAG AGCTGGACTC CTTTAAGGAG GAACTGGATA |
| 3601 | AGTATTTTAA GAACCACACA AGCCCAGATG TGGATCTCGG GGACATCTCC |
| 3651 | GGAATTAACG CCTCCGTGGT GAATATCCAG AAGGAGATTG ACCGCCTAAA |
| 3701 | TGAAGTTGCC AAGAACCTCA ATGAGTCTCT GATTGATCTG CAGGAACTGG |
| 3751 | GCAAGTATGA GCAGTATATC AAATGGCCCT GGTACATTTG GCTGGGGTTT |
| 3801 | ATCGCCGGAC TGATTGCCAT CGTCATGGTG ACCATCATGC TGTGTTGCAT |
| 3851 | GACCTCCTGT TGTTCCTGTC TGAAGGGCTG CTGTAGTTGC GGCTCTTGCT |
| 3901 | GTAAATTCGA CGAAGATGAT AGCGAGCCCG TGCTGAAGGG CGTGAAGCTG |
| 3951 | CATTATACCT GACGGGTGGC ATCCCTGTGA CCCCTCCCCA GTGCCTCTCC |
| 4001 | TGGCCCTGGA AGTTGCCACT CCAGTGCCCA CCAGCCTTGT CCTAATAAAA |
| 4051 | TTAAGTTGCA TCAAGCT |

[0657] Template-dependent RNA synthesis of unmodified nucleotides yielded a polynucleotide with the nucleic acid sequence of SEQ ID NO: 147 which comprises the optimized nucleic acid sequence of SEQ ID NO: 148. In a multi-step, enzyme-catalyzed process, the final mRNA product was synthesized, which was purified to remove enzyme reagents and prematurely aborted synthesis products (“shortmers”).

[0658] The final mRNA had the structural elements shown in Table 4. The SARS-COV-2 S protein coding sequence is flanked by 5′ and 3′ untranslated regions (UTRs) of 140 and 105 nucleotides, respectively. The mRNA also contains a 5′ cap structure consisting of a 7-methyl guanosine (m7G) residue linked via an inverted 5′5′ triphosphate bridge to the first nucleoside of the 5′ UTR, which is itself modified by 2′Oribose methylation. The 5′ cap is essential for initiation of translation by the ribosome. The entire linear structure is terminated at the 3′ end by a tract of approximately 100 to 500 adenosine nucleosides (polyA). The polyA region confers stability to the mRNA and is also thought to enhance translation. All of these structural elements are naturally occurring components which are required for the efficient translation of the SARS-COV-2 spike mRNA.

[0659] The purified mRNA was encapsulated in lipid nanoparticles (LNPs) comprising a proprietary cationic lipid, a non-cationic lipid (DOPE), a cholesterol-based lipid (cholesterol) and a PEG-modified lipid (DMG-PEG-2K). The final mRNA-LNP formulation was an aqueous suspension.

### Example 6. Induction of a Neutralizing Antibody Response in Mice

[0660] This example demonstrates that an immunogenic composition of LNP-encapsulated mRNA comprising an optimized nucleotide sequence encoding a full-length pre-fusion stabilized SARS-COV-2 S protein induces a robust response of binding and neutralizing antibodies against the SARS-COV-2 S protein in mice.

[0661] The LNP formulation prepared in Example 5 was used to immunize mice twice by intramuscular injection (IM), at Day 0 and Day 21 (see FIG. 9C). Four groups of eight 6-8 week-old BALB/c mice were immunized with 0.2 μg, 1 μg, 5 μg or 10 μg mRNA per dose, respectively. A fifth group of mice (which served as a negative control) received only the diluent of the mRNA-LNP composition. Seven days (Day 7) prior to immunization a blood sample was taken from each mouse to determine the baseline level of antibodies against the SARS-COV-2 S protein. Additional blood samples were taken at Day 14, Day 21, Day 28 and Day 35. The mouse experiments were carried out in compliance with all pertinent US National Institutes of Health regulations and approval from the Animal Care and Use Committee of Covance Inc, Denver, PA.

[0662] An ELISA assay was used to determine the antibody titer against SARS-COV-2 S protein. 96-well plates were coated with commercially available SARS-COV-2 S protein (SinoBio), incubated with serially diluted mouse sera from Day −7, Day 14, Day 21, Day 28 and Day 35 and probed with secondary antibodies to detect bound total mouse IgG.

[0663] To determine titers of neutralizing antibodies, a pseudovirus-based assay was used. 39 individual conversion serum samples from COVID-19 patients with mild, strong and severe symptoms served as positive control. Serum samples were diluted 1:4 in medium (FluoroBrite phenol red free DMEM+10% FBS+10 mM HEPES+1% PS+1% Glutamax) and heat inactivated at 56° C. for 30 minutes. A further 2-fold, 9-point serial dilution series of the heat inactivated sera was performed in the same media. Diluted serum samples were mixed with a volume of Reporter Virus Particle (RVP)-Green Fluorescent Protein (GFP) (Integral Molecular) diluted to contain ˜300 infectious particles per well and incubated for 1 hour at 37° C. 96-well plates of ˜50% confluent 293T-hsACE2 clonal cells in 75 μL volume were inoculated with 50 μL of the serum+virus mixtures in singleton and incubated at 37° C. for 72h. At the end of the 72-hour incubation, plates were scanned on a high-content imager and individual GFP expressing cells counted. The neutralizing antibody titers are reported as the reciprocal of the dilution that reduced the number of virus plaques in the test by 50% (see FIG. 9B).

[0664] The results of this mouse immunization experiment are summarized FIGS. 9A and 9B. Even after a single shot, a robust antibody response was observed by ELISA at Day 14 for all tested doses (see FIG. 9A). A second shot resulted in a significant boost of the antibody response and dramatically improved the titer of neutralizing antibodies (see FIG. 9B). Administration of two doses of 1 μg, 5 μg or 10 μg mRNA resulted in comparable antibody titers as determined by ELISA at Day 35. As can be seen in FIG. 9B, two doses of 0.2 μg mRNA were slightly less effective in inducing neutralizing antibodies at Day 35, whereas two doses of 1 μg, 5 μg or 10 μg mRNA induced comparable titers of antibodies at Day 35, exceeding the titer of neutralizing antibodies observed in the conversion sera of human patients previously infected with SARS-CoV-2.

[0665] This example demonstrates that the immunogenic composition tested in this example induces a robust neutralizing antibody response after two doses. The magnitude of the response was dose-dependent. The results indicate that the immunogenic composition can induce neutralizing antibody titers comparable to those in convalescent human patients.

### Example 7. Induction of a Th1-Biased T Cell Response in Mice

[0666] A vaccine that promotes Th1-biased immunity is typically more protective against viral pathogens than a vaccine that does not. The secretion of Th1 cytokines such as IFN-γ activates cytotoxic T lymphocytes (CTL), a sub-group of T cells, which can induce the death of cells infected with viruses. This example demonstrates that the immunogenic composition tested in Example 6 induces a Th1-biased T cell response in mice.

[0667] To further assess the quality of the immune response of the vaccine tested in Example 6, the experiment described in that example was repeated by immunizing groups of mice twice by IM injection with 5 μg or 10 μg mRNA, respectively. Blood was sampled on days Day-4 (baseline), Day 14, Day 21, Day 28 and Day 35 (see FIG. 10C). The mouse experiments were carried out in compliance with all pertinent US National Institutes of Health regulations and approval from the Animal Care and Use Committee of Covance Inc, Denver, PA. The mice were sacrificed on Day 35, and their spleens were removed. The isolated spleens were homogenized and splenocytes isolated as described below. IFN-γ and IL-5 secretion by peptide-stimulated splenocytes was determined by ELISPOT assay.

[0668] Harvested spleens were stored in a 5 mL of chilled medium on ice. Just prior to processing the spleens were placed into a sterile petri dish containing medium. The back of a 10 cc syringe plunger was used to homogenize the spleens. The homogenate was passed through a filter and transferred into a sterile tube. The homogenate was then be pelleted by centrifugation at 1200 rpm for 8-10 minutes. Supernatant was gently poured off and edge of tube blotted with a clean paper towel. ACK lysis buffer was added to lyse the red blood cells and cells were incubated at room temperature for 5 min. The tube was centrifuged at 1200 rpm for 8-10 minutes. Supernatants were poured off and pellet resuspended in 2 mM L-Glutamine CTL-Test Media. The suspensions were filtered into new 15 mL conical tubes. The cells were maintained at 37° C. in humidified incubator, 5% CO2 until use.

[0669] Solution with PepMix™ SARS-COV-2 (Spike Glycoprotein, Cat #PM-WCPV-S-1) peptide pool 1 and peptide pool 2 were prepared using test medium. Final concentration of each peptide in the assay was 2 μg/ml. As a positive control, 1 μg/ml of ConA in test medium were used. These antigen/mitogen solutions were plated at 100 μL/well. The plates containing the antigen/mitogen solutions were placed into a 37° C. incubator for 10-20 minutes before plating cells to ensure the pH and temperature were optimal for cells. The cell concentration was adjusted to the desired concentration. 0.3×10⁶/100 μl/well splenocytes were added to the plates with the antigen/mitogen solution. Once completed, the plate was gently taped and placed into a 37° C. humidified incubator, 5% CO2 and incubated overnight. Plates were washed 2× with PBS and then 2× with 0.05% Tween-PBS, 200 μL/well.

[0670] Mouse IFN-γ/IL-5 Double-Color enzymatic ELISPOT kits (CTL Shaker Heights, Cleveland,) were used according to the manufacture's protocol. Detection solution was prepared per manufacturer's instructions and 80 μL was added to each well. The plates were then incubated at RT for 2 hrs. Plates were washed 3× with 0.05% Tween-PBS, 200 μL/well. Tertiary solution at 80 μL/well was added and plates will be incubated at RT for 30 min. Plates were washed 2× with 0.05% Tween-PBS, and then 2× with distilled water, 200 μL/well each time. Developer Solution was added to wells at 80 μL/well and incubated at RT for 15 min. Reaction was stopped by gently rinsing membrane with tap water three times. Plates were air-dried and scanned using a CTL analyzer. The number of cytokine producing cells per million cells is reported (see FIG. 10).

[0671] As can be seen from FIG. 10A, splenocytes isolated at Day 35 from mice immunized twice with either 5 μg or 10 μg of mRNA secreted large amounts of the Th1 cytokine IFN-γ. As can be seen from FIG. 10B, these cells did not, however, secrete detectable amounts of the Th2 cytokine IL-5.

[0672] This example demonstrates that the tested immunogenic composition is effective in inducing a Th1-biased T cell response in mice, indicating that vaccination with this immunogenic composition can induce a CTL response that recognizes and eliminates SARS-COV-2-infected cells.

### Example 8. Induction of a Neutralizing Antibody Response in Cynomolgus Monkeys

[0673] This example demonstrates that an immunogenic composition of LNP-encapsulated mRNA comprising an optimized nucleotide sequence encoding a full-length pre-fusion stabilized SARS-COV-2 S protein induces a robust response of binding and neutralizing antibodies against the SARS-COV-2 S protein in cynomolgus monkeys.

[0674] The LNP formulation prepared in Example 5 was used to immunize monkeys twice by IM administration, at Day 0 and Day 21 (see FIG. 11D). Three groups of four 3-4 year-old cynomolgus monkeys were immunized with 15 μg, 45 μg or 135 μg mRNA per dose, respectively. Four days (Day −4) prior to immunization a blood sample was taken from each monkey to determine the baseline level of antibodies against the SARS-COV-2 S protein. Additional blood samples were taken at Day −4, Day 2, Day 7, Day 14, Day 21, Day 23, Day 28 and Day 35 and Day 42. Cynomolgus monkey experiments were carried out in compliance with all pertinent US National Institutes of Health regulations and approval from the Animal Care and Use Committee of the New Iberia Research Center.

[0675] An ELISA assay was used to determine the antibody titers against SARS-COV-2 S protein in the blood samples obtained from the cynomolgus monkeys. 39 individual serum samples from COVID-19 patients with mild, strong and severe symptoms served as positive control. Nunc microwell plates were coated with SARS-COV S-GCN4 protein (GeneArt, expressed in Expi 293 cell line) at 0.5 μg/ml in PBS overnight at 4° C. Plates were washed 3 times with PBS-Tween 0.1% before blocking with 1% BSA in PBS-Tween 0.1% for 1 hour. Samples were plated with 1:450 initial dilution followed by 3-fold, 7-point serial dilution in blocking buffer. Plates were washed 3 times after 1-hour incubation at room temperature before adding 50 ul of 1:5000 Rabbit anti-human IgG (Jackson Immuno Research) to each well. Plates were incubated at room temperature for 1 hr and washed 3×. Plates were developed using Pierce 1-Step Ultra TMB-ELISA Substrate Solution for 6 minutes and stopped by TMB STOP solution. Plates were read at 450 nm in SpectraMax plate reader. Antibody titers were reported as the highest dilution that is equal to 0.2 OD cutoff.

[0676] Titers of neutralizing antibodies in the serum of the cynomolgus monkeys were determined using a pseudovirus-based assay. 39 individual conversion serum samples from COVID-19 patients with mild, strong and severe symptoms served as positive control. Serum samples were diluted 1:4 in media (FluoroBrite phenol red free DMEM+10% FBS+10 mM HEPES+1% PS+1% Glutamax) and heat inactivated at 56° C. for 30 minutes. A further, 2-fold, 9-point, serial dilution series of the heat inactivated serum was performed in media. Diluted serum samples were mixed with a volume of reporter virus particle (RVP)-GFP (Integral Molecular) diluted to contain ˜300 infectious particles per well and incubated for 1 hour at 37° C. 96-well plates of ˜50% confluent 293T-hsACE2 clonal cells in 75 μL volume were inoculated with 50 μL of the serum+virus mixtures in singleton and incubated at 37° C. for 72h. At the end of the incubation, plates were scanned on a high-content imager and individual GFP expressing cells counted. The neutralizing antibody titers are reported as the reciprocal of the dilution that reduced the number of virus plaques in the test by 50% (see FIG. 11B).

[0677] In addition, the microneutralization titer of each monkey sample was determined, using the 39 human conversion sera as positive controls. Vero E6 cells were seeded into 96-well flat bottom cell culture plates at a concentration of 2×10⁴ cells in 0.1 mL per well one day before use. On the day of the experiment, starting at a 1:10 dilution, 2-fold serial dilutions of heat-inactivated monkey or human sera were incubated with SARS-COV-2 virus (e.g., isolate USA-WA1/2020 [BEI Resources; catalog #NR-52281] in a 37° C. incubator for 60±5 minutes. Then the growth medium was aseptically removed from the Vero E6 cells and the test samples (sera and virus) were added to the Vero E6-seeded plates and incubate in a 37° C. incubator for 30±5 minutes. Subsequently, 100 μL of growth medium was added to all wells of all the plates without removing the existing inoculum. The plates were then placed back into the incubator and incubated for 2 days. Two days post infection, the cells were fixed and stained with primary antibody (SARS-COV anti-nucleoprotein mouse monoclonal antibody (SinoBio catalog #40143-MM05 or equivalent) and then with HRP-tagged secondary antibody (Horseradish peroxidase (HRP)-conjugated goat anti-mouse immunoglobulin G (IgG) antibody (Jackson ImmunoResearch Laboratories, catalog #115-035-062 or equivalent).

[0678] The results of these assays are summarized in FIG. 11. Even at the lowest tested mRNA dose of 15 μg, a robust binding and neutralizing antibody response was observed after two shots (see FIGS. 11A and 11B). Administration of two doses of 15 μg, 45 μg or 135 μg mRNA resulted in comparable antibody titers as determined by ELISA at Days 28, 35 and 42 (see FIG. 11A). Two doses of 15 μg or 45 μg mRNA also yielded comparable levels of neutralizing antibodies at these days (see FIG. 11B). Two doses of 135 μg mRNA induced titers of antibodies at Days 28, 35 and 42 that exceeded the titers of neutralizing antibodies observed in conversion sera of human patients infected with SARS-COV-2. The microneutralization titer assay provided similar results, with 15 μg and 45 μg mRNA doses resulting in comparable titers, and the 135 μg dose exceeding the titers observed in conversion sera of human patients infected with SARS-COV-2 (see FIG. 11C).

[0679] This example demonstrates that the tested immunogenic composition induces a robust neutralizing antibody response even at the lowest dose of 15 μg after two shots, when the period between administrations is at least 2 weeks (in particular about 3 weeks). The data support the use of the test composition in human patients to induce a protective neutralizing antibody response.

### Example 9. Induction of a Th1-Biased T Cell Response in Cynomolgus Monkeys

[0680] This example demonstrates that the immunogenic composition tested in Example 8 induces a Th1-biased T cell response in cynomolgus monkeys.

[0681] To further assess the quality of the immune response of the vaccine tested in Example 8, PBMCs were isolated as cynomolgus blood samples. Isolated PBMCs were stored in cryovials. T cell responses were assessed by determining IFN-γ and IL-13 secretion by peptide-stimulated PBMC using ELISPOT assays. Naïve PBMCs served as a control to establish baseline levels of IFN-γ or IL-13 secretion in non-activated, non-stimulated cells. The results are summarized in FIG. 12.

[0682] To perform the assays, complete medium for monkey PBMCs (DMEM1640+10% heat-inactivated FCS) was prewarmed in a 37° C. water bath. PBMCs cryovials were quickly thawed in a 37° C. water bath, and their content was slowly transferred dropwise into the prewarmed medium in conical tubes. The tubes were then centrifuged at 1500 RPM for 5 mins. The cell pellets were washed once with prewarmed complete medium, and re-pelleted at 1500 RPM for 15 min. The supernatant was discarded, and PBMCs were resuspended with complete medium and counted using a Guava cell counter.

[0683] Monkey IFN-γ ELISPOT kit (CTL, cat #3421M-4APW) and IL-13 ELISPOT kit (CTL, cat #3470M-4APW) were used to determine the levels of IFN-γ and IL-13 secretion by peptide-stimulated PBMCs. The precoated plates provided with the kits were washed 4 times with sterile PBS and then blocked with 200 μl/well complete medium. The blocking step was performed in a 37° C. incubator for at least 30 minutes. PepMix™ SARS-COV-2 (JPT Cat #PM-WCPV-S-1) peptide pool 1 and pool 2 were used as recall antigens at a final concentration of 2 μg/ml per peptide in the assay. 2 μg/ml of Concanavalin A (Sigma, cat #C5275) was used as a positive control. 50 μl of recall antigen and 300,000 PBMCs in 50 μl were added to each well for stimulation. The plates were then placed in a 37° C., 5% CO2 humidified incubator for 24 hours. Following the 24 hour incubation, the plates were washed 5 times with PBS. 100 μl/well of biotinylated anti-IFN-γ or anti-IL-13 detection antibodies (1 μg/ml) prepared in PBS containing 1% fetal calf serum were added, and the plates were incubated for 2 hours at room temperature. The plates were then washed 5 times with PBS as before and incubated for 1 hr at room temperature with 100 μl/well of streptavidin at a dilution of 1:1000 in PBS containing 1% fetal calf serum. The plates were again washed 5 times with PBS and developed using 100 μl/well BCIP/NBT substrate solution until the spots were visible. Color development was stopped by washing the plates in tap water. The plates were then dried overnight, scanned, and spots were counted using a CTL analyzer. The data are reported as spot forming cells (SFC) per million PBMCs (see FIG. 12).

[0684] As can be seen from FIGS. 12A (peptide pool S1) and 12C (peptide pool S2), PBMCs isolated at Day 42 from monkeys immunized twice with a dose of 15 μg, 45 μg or 135 μg mRNA secreted large amounts of the Th1 cytokine IFN-γ in response to stimulation with peptides derived from the SARS-COV-2 S protein. In contrast, these cells secreted only baseline amounts of the Th2 cytokine IL-13 in response to peptide stimulation (see FIGS. 12B (peptide pool S1) and 12D (peptide pool S2)).

[0685] This example demonstrates that the tested immunogenic composition is effective in inducing a Th1-biased T cell response in cynomolgus monkeys, indicating that vaccination with this immunogenic composition can induce a CTL response in humans that recognizes and eliminates SARS-COV-2-infected cells.

### Example 10. Dose Modelling

[0686] This example demonstrates that low mRNA doses of the immunogenic composition tested in Examples 6 and 8 are effective in yielding neutralizing antibody titers that are significantly higher than corresponding titers observed in a control panel of convalescent sera from COVID-19 patients.

[0687] There were no statistically significant differences in pseudovirus neutralization titers on Day 35 between 1 μg, 5 μg and 10 μg groups of immunized mice described in Example 6, suggesting a dose-saturation effect beyond 1 μg of mRNA comprising the tested optimized nucleotide sequence encoding a full-length pre-fusion stabilized SARS-COV-2 S protein. Peak pseudovirus neutralization titers on Day 35 in mice were significantly higher than corresponding titers observed in the control panel of convalescent sera from COVID-19 patients (see FIG. 13A).

[0688] The results from both the pseudovirus neutralization assay and the microneutralization assay for the cynomolgus monkey experiments described in Example 8 were highly correlated (FIG. 13B). Regardless of the dose levels, Day 35 pseudovirus and microneutralization titers were about 130-fold higher than that of pre-immune animals. Further statistical analysis of a complete data set with 93 convalescent sera from COVID-19 patients revealed that the titers obtained with mRNA doses of 15 μg, 45 μg and 135 μg, respectively, were significantly higher than corresponding titers observed in the convalescent human sera (all P values were less than 0.005; FIGS. 13C and 13D).

[0689] This example supports an mRNA dose range of 10 μg to 200 μg for human clinical trials that investigate the safety and efficacy of the immunogenic composition prepared in Example 5. Indeed, a dose between 15 μg and 45 μg may be sufficient to induce an effective neutralizing antibody response, while being well-tolerated at the same time.

### Example 11. Immunogenicity of mRNAs Encoding Full-Length Prefusion Stabilized SARS-CoV-2 S Proteins

[0690] This example demonstrates that an mRNA encoding a SARS-COV-2 S protein that has been modified relative to naturally occurring SARS-COV-2 S protein to remove the furin cleavage site and to mutate residues 986 and 987 to proline (2P/GSAS) is more effective in eliciting a neutralizing antibody response than mRNA encoding other full-length prefusion stabilized SARS-COV-2 S protein.

[0691] To determine the impact of mutations that stabilize the SARS-COV-2 S protein in its prefusion confirmation on immunogenicity, seven mRNA constructs—a wild-type SARS-COV-2 S protein (WT) and corresponding prefusion stabilized SARS-COV-2 S proteins (2P, GSAS, 2P/GSAS, 2P/GSAS/ALAYT, 6P and 6P/GSAS, respectively)—were formulated in a lipid nanoparticle (LNP) as mRNA vaccines as described in Example 5. WT, 2P/GSAS, 2P, GSAS, correspond to constructs A-D in example 3 respectively. 2P/GSAS/KLHYT is a SARS-COV-2 S protein mutated to remove a furin cleavage site, to replace residues 986 and 987 with proline and to mutate the ER retrieval signal, which has the optimized nucleic acid sequence of SEQ ID NO: 124 and an amino acid sequence of SEQ ID NO: 125. 6P is a SARS-COV-2 S protein mutated to replace residues 817, 892, 899, 942, 986 and 987 with proline, which has the optimized nucleic acid sequence of SEQ ID NO: 128 and an amino acid sequence of SEQ ID NO: 129. 6P/GSAS is a SARS-COV-2 S protein mutated to remove a furin cleavage site and to replace residues 817, 892, 899, 942, 986 and 987 with proline, which has the optimized nucleic acid sequence of SEQ ID NO: 130 and an amino acid sequence of SEQ ID NO: 131.

[0692] Two animal models were used for the immune assessment. BALB/c mice were administered two immunizations at a three-week interval with a 0.4 μg per dose of each of five formulations (WT, 2P, GSAS, 2P/GSAS, 2P/GSAS/ALAYT). In parallel, non-human primates (NHPs) were immunized using the same immunization schedule at 5 μg per dose of six S mRNA vaccines (2P, GSAS, 2P/GSAS, 2P/GSAS/ALAYT, 6P and 6P/GSAS).

[0693] To evaluate for functional antibodies, e.g., nAbs titers, the ability of immune sera to neutralize the infectivity of GFP reporter pseudoviral particles (RVP) in HEK-293T cells stably over-expressing human ACE2 was tested. RVPs expressing SARS COV-2 S protein are capable of a single round of infection, indicated by GFP expression upon entry. Neutralizing potency was determined as the serum dilution which can achieve 50% inhibition of RVP entry (ID50). In addition, Enzyme-Linked Immunosorbent Assay (ELISA) titers were evaluated using a recombinant soluble S-protein trimerized by GCN4 helix bundle as antigen.

[0694] Although a few animals developed neutralizing titers at Day 14 after the first immunization, the titers were in general low. Expectedly, the majority of test animals developed neutralizing titers after the second immunization (FIG. 14). On Day 35, the geometric mean titers (GMTs) with the 95% confidence interval (95% CI) for pseudoviral (PsV) nAb titers in mice were 152 (36; 645) for WT, 195 (44; 870) for 2P, 1005 (261; 3877) for GSAS, 354 (129; 976) for 2P/GSAS and 940 for 2P/GSAS/ALAYT. There was a trend for higher GMTs, especially at Day 35 and Day 42, for the three constructs with GSAS mutations when compared to those of WT and 2P constructs.

[0695] In NHPs, diverse neutralizing titers were observed within each group even after the second immunization (FIG. 14). 2P and 6P/GSAS vaccines showed lower immunogenicity than other constructs with GMTs at Day 35 of 78 and 10, respectively. The 6P vaccine failed to elicit any detectable neutralizing titers. Consistent with the observations in the mouse study, all GSAS constructs with the exception of 6P/GSAS induced higher neutralizing titers after the second dose, with GMTs (95% CI) at D35 recorded as 425 (48; 3769) for GSAS, 772 (116; 5121) for 2P/GSAS, 280 (11; 6970) for 2P/GSAS/ALAYT, as compared to those of the 2P vaccine group. The trending of GMTs in both mice and NHPs suggested superior immunogenicity for 2P/GSAS to other constructs. Moreover, the peak PsVNa titers (Day 35) for the 2P/GSAS variant in mice and NHPs were comparable or higher than the titers observed in a panel of 93 convalescent sera from COVID-19 patients.

[0696] This example demonstrates that the GSAS mutation is beneficial for vaccine immunogenicity. The 2P mutation, which was introduced for stabilization of prefusion form of S protein, appeared beneficial in the context of the GSAS mutation, while ALAYT showed less impact on immunogenicity, especially in NHPs, in the context of 2P/GSAS. Accordingly, this example provides further confirmation that an optimized mRNA encoding a SARS-COV-2 S protein that has been modified relative to naturally occurring SARS-COV-2 S protein to remove the furin cleavage site and to mutate residues 986 and 987 to proline can be more effective in inducing neutralizing antibodies than mRNAs encoding other prefusion stabilized SARS-COV-2 S protein.

### Example 12. Protective Efficacy in Syrian Golden Hamsters

[0697] This example demonstrates that an immunogenic composition of LNP-encapsulated mRNA comprising an optimized nucleotide sequence encoding a SARS-COV-2 S protein that has been modified relative to naturally occurring SARS-COV-2 S protein to remove the furin cleavage site and to mutate residues 986 and 987 to proline can have protective efficacy in an animal model of COVID-19 by reducing viral infection of the lung and preventing lung pathology.

[0698] SARS-COV-2 infection in Syrian golden hamster is a pathology model, where the viral infection is associated with high levels of virus replication with peak titers in the lungs and nasal epitheliums at 2 day post infection (DPI), histopathological evidence of disease in lungs at 7 DPI, and about 8-15% weight loss around 7 DPI.

[0699] To evaluate the potential of the LNP formulation prepared in Example 5 to protect against viral infection and disease, Syrian golden hamsters were immunized with four vaccine formulation dose levels of 0.15, 1.5, 4.5 or 13.5 μg per dose, either per a single IM immunization at D21 or two IM administrations at Day 0 and Day 21. Animals were challenged at Day 49 via intranasal (IN) inoculation of SARS-COV-2 and monitored for clinical manifestations of disease as body weight loss at 8 DPI. Lungs and nasal tissues were harvested at 4 or 7 DPI for histopathology, and for quantification of viral replication by subgenomic RNA RT-PCR assays.

[0700] The LNP formulation of Example 5 induced robust dose-dependent neutralizing antibody responses after the first vaccination, which were significantly enhanced by the second immunization. After the first immunization, all animals, except for the 0.15 μg dose group, developed neutralizing antibodies recorded as plaque reduction neutralization titers (PRNT) against wild-type SARS-COV-2 virus. Day 35 PRNT50 GMTs for single-dose immunization schedules were 237, 410 and 711 for 1.5, 4.5 and 13.5 μg dose respectively, while corresponding values for two-dose groups were 3219, 2446 and 3219. Despite the observed trend towards higher titers with increasing dose, the differences between titers in the 1.5, 4.5 and 13.5 μg groups were not statistically significant.

[0701] To test the protective effects of vaccination, all groups were challenged intranasally. The body weight for each animal was monitored daily for 7 days (FIG. 15a). Sham (diluent) vaccinated animals were observed with most significant weight loss, with more than 10% loss at 7 DPI. The vaccination regimens of 1.5, 4.5, and 13.5 μg, regardless of one-dose or two-dose regimens, protected animals against body weight loss, with most animals experiencing less than 5% loss, with the loss mostly peaking around 2-3 DPI. There was no significant difference for the weight comparison among these groups. The only group experiencing a similar degree of weight loss, compared to that of sham group, was the 0.15 μg dose group with single immunization.

[0702] To assess the pathology caused by viral infection, lung samples were harvested from 4 animals of each group on either 4 or 7 DPI, and the fixed tissues were sectioned, and randomized and blinded for histopathological examination. A pathology score of 0-3 was assigned to each sample, based on severity of tissue damages, with higher score reflecting the more severe pathology. A score of 1 was attributed to lung sections that revealed histopathology findings in less than 25% of the section. Similarly, if greater than 25% but less than 50% of the parenchyma was involved, a score of 2 was assigned. A score of 3 was designated to those sections where more than 50% of the total section was affected. Sham vaccinated hamsters inoculated with SARS-COV-2 revealed widespread lung histopathology which resemble the reports of severe pneumonia detected in COVID-19 patients (FIG. 15b). Lungs from naïve hamsters were histologically unremarkable. Similar lesions could be seen in lung samples from the 0.15 μg dose group of single vaccination, which was scored as 3 in blind examination. On the contrary, the lung samples from the 13.5 μg dose group of single vaccination revealed no such lesions, similar to that of health control, and both were scored as 0 (FIG. 15c).

[0703] Lung pathology was markedly attenuated in hamsters that received either one or two doses of the LNP formulation of Example 5, and there appeared to be a dose-dependent effect at both 4 and 7 DPI (FIG. 15b). While a single vaccination of 1.5, 4.5 and 13.5 μg substantially attenuated pathology caused by infection, the two-dose vaccination of 1.5, 4.5 and 13.5 μg provided almost complete protection against pathology. The very low dose level of 0.15 μg showed no protection when used in a single-dose regimen but some marginal protection in a two-dose vaccination regimen.

[0704] To assess whether immunization with the LNP formulation of Example 5 could impact viral infection in hamsters, viral subgenomic mRNA (sgRNA) from lung and nasal samples by RT PCR were measured. Lung and nasal samples of half the group (n=4) were collected at either 4 or 7 DPI and total RNA was processed for detection of sgRNA by RT-PCR (FIG. 15d). For lung samples collected at 4 and 7 DPI, the sham vaccinated group yielded about 108 and 105 copies per gram tissues, respectively, while those receiving the 13.5 μg two-dose regimen were below the level of detection at both time points. The lung samples from those receiving the 1.5 μg and 4.5 μg two-dose regimens had a nearly 3 log reduction in viral sgRNA copies at 4 DPI and were below detection at 7 DPI. For the lung samples from those receiving the 1.5, 4.5 and 13.5 μg single-dose vaccination, the viral loads at 4 DPI were not different from those of the sham vaccinated group while the loads at 7 DPI were below the threshold of detection. Notably, the lung samples from the 0.15 μg receiving one-dose or two-dose regimens had similar or even higher viral load as compared to those of the sham vaccinated group at either 4 or 7 DPI. However, the viral loads (sgRNA) were more diverse at 4 DPI among all groups, with one or two animals testing negative in most groups. The only group that achieved clearance of viral sgRNA in nasal samples at 7 DPI was the 13.5 μg two-dose vaccination group.

[0705] This example demonstrates that the immunogenic composition prepared in Example 5 can reduce viral infection of the lung and prevent lung pathology in an animal model of COVID-19. Immunization with the immunogenic composition prepared in Example 5 may have an impact on transmission due to shortened duration and lower loads of viral shedding from the upper respiratory tract.

### Example 13. Preparation of mRNA-Encapsulating Lipid Nanoparticles

[0706] An mRNA comprising an optimized nucleotide sequence encoding a full-length SARS-COV-2 S protein that has been modified relative to naturally occurring SARS-COV-2 spike protein to remove the furin cleavage site, to mutate residues 986 and 987 to proline and which contains the L18F, D80A, D215G, ΔL242, ΔA243, ΔL244, K417N, E484K, N501Y, D614G and A701V mutations (South African variant 2+D614G) was synthesized in vitro. The mRNA was prepared using a template plasmid comprising the sequence SEQ ID NO: 166 operable linked to an RNA polymerase promoter sequence.

[0707] Template-dependent RNA synthesis of unmodified nucleotides yielded a polynucleotide with the nucleic acid sequence of SEQ ID NO: 172 which comprises the optimized nucleic acid sequence of SEQ ID NO: 173. In a multi-step, enzyme-catalyzed process, the final mRNA product was synthesized, which was purified to remove enzyme reagents and prematurely aborted synthesis products (“shortmers”).

[0708] The final mRNA had the structural elements shown in mRNA construct 2 in Table 4. The SARS-COV-2 S protein coding sequence is flanked by 5′ and 3′ untranslated regions (UTRs) of 140 and 105 nucleotides, respectively. The mRNA also contains a 5′ cap structure consisting of a 7-methyl guanosine (m7G) residue linked via an inverted 5′5′ triphosphate bridge to the first nucleoside of the 5′ UTR, which is itself modified by 2′Oribose methylation. The 5′ cap is essential for initiation of translation by the ribosome. The entire linear structure is terminated at the 3′ end by a tract of approximately 100 to 500 adenosine nucleosides (polyA). The polyA region confers stability to the mRNA and is also thought to enhance translation. All of these structural elements are naturally occurring components which are required for the efficient translation of the SARS-CoV-2 spike mRNA.

[0709] The purified mRNA was encapsulated in lipid nanoparticles (LNPs) comprising 40% cKK-E10, 30% DOPE, 28.5% Cholesterol and 1.5% DMG-PEG-2K (molar ratios). The final mRNA-LNP formulation was an aqueous suspension.

### Example 14. Neutralizing Antibody Response Effective Against Variant Strains of SARS-COV-2

[0710] This example demonstrates that non-human primates (NHPs), which previously had been immunized with two doses of the LNP formulation of Example 5, mount an effective neutralizing antibody response against the SARS-COV-2 S protein derived from the original Wuhan strain as well as naturally occurring variants of the SARS-COV-2 S protein observed in South Africa, Japan/Brazil and California, and an S protein derived from SARS-COV-1 in response to exposure with an immunogenic composition of LNP-encapsulated mRNA comprising an optimized nucleotide sequence encoding a SARS-COV-2 S protein that has been modified relative to naturally occurring SARS-COV-2 S protein to remove the furin cleavage site to mutate residues 986 and 987 to proline and which contains the L18F, D80A, D215G, ΔL242, ΔA243, ΔL244, K417N, E484K, N501Y, D614G and A701V mutations of a South African variant (South African variant 2+D614G) of SARS-COV-2. The immunogenic composition was prepared as described in Example 13.

[0711] A non-human primate (NHP) model (cynomolgus monkeys) was used to investigate whether the original antigen specificity towards the original Wuhan strain, which was induced by the mRNA vaccine described in Example 5 (encoding a prefusion-stabilized Wuhan variant of the SARS-COV-2 protein), could be overcome by subsequent immunization with an mRNA vaccine comprising an optimized nucleotide sequence encoding a prefusion-stabilized South African (SA) variant of the SARS-COV-2 S protein, either alone or in combination of the mRNA vaccine of Example 5 (Wuhan), in order to elicit a broad immune response targeting different circulating variants of SARS-COV-2 and an S protein derived from SARS-COV-1. Cynomolgus monkeys (n=4) were immunized twice three weeks apart (Day 0 and Day 21) with either 15 μg, 45 μg or 135 μg each of the LNP formulation prepared in Example 5. On Day 315 animals were randomized, distributed in two groups and immunized. Group 1 was immunized with an mRNA vaccine described in Example 13, which contained mutations derived from a South African variant of SARS-COV-2 (SA alone). Group 2 was immunized with a formulation that contained the original mRNA vaccine from Example 5 plus the variant given to Group 1 (Wuhan+SA). Both Group 1 and Group 2 received a total mRNA dose of 10 μg. The study was designed to evaluate whether a bivalent immunogenic composition (Wuhan+SA) was required to broaden the antigen response, or whether a monovalent immunogenic composition comprising a SARS-CoV-2 S protein derived from a non-Wuhan variant (SA alone) was sufficient to broaden the antigen response.

[0712] Serum samples from pre-immunized and pre-boost animals (Day 4, Day 308) as well as samples collected on Day 14, Day 21, Day 28, Day 35, Day 42, Day 90, Day 308 and Day 329 were tested in a Wuhan S-protein-expressing pseudovirus (PsV) neutralization assay. Serum samples collected on Day 35, Day 308 and Day 329 were tested in pseudovirus (PsV) neutralization assays. The tested PsVs expressed an S protein derived from SARS-COV-2 strains Wuhan, South African (SA 20C and SA 20H), Japan/Brazil (Jap/Braz) or California, or an S protein derived from a SARS-COV-1 strain, as shown in FIG. 16. Serum samples were diluted in medium (FluoroBrite phenol red free DMEM+10% FBS+10 mM HEPES+1% PS+1% Glutamax) and heat-inactivated at 56° C. for 30 minutes. A further, 2-fold, 11-point, serial dilution series of the heat-inactivated serum was performed in medium. Diluted serum samples were mixed with reporter virus particle (RVP)-GFP (Integral Molecular) diluted to contain ˜300 infectious particles per well and incubated for 1 hour at 37° C. 96-well plates of ˜50% confluent 293T-hsACE2 clonal cells in 75 μL volume were inoculated with 50 μL of the serum+RVP mixtures in singleton and incubated at 37° C. for 72h. At the end of the incubation, plates were scanned on a high-content imager and individual GFP expressing cells were counted. The inhibitory dilution titer (ID50) was reported as the reciprocal of the dilution that reduced the number of virus plaques in the test by 50%. ID50 for each test sample was interpolated by calculating the slope and intercept using the last dilution with a plaque number below the 50% neutralization point and the first dilution with a plaque number above the 50% neutralization point (ID50 Titer=(50% neutralization point-intercept)/slope). The results are summarised in FIG. 17.

[0713] As can be seen from FIG. 17, in both groups of NHPs booster immunization with an mRNA vaccine comprising an optimized nucleotide sequence encoding a fusion-stabilized South African variant of the SARS-COV-2 S protein about 9 months after the original 2-dose prime-boost immunization resulted in high neutralization potencies against Wuhan PsV, which expressed the SARS-COV-2 S protein of the original Wuhan strain. These data suggest that exposure to an mRNA vaccine encoding a South African variant of the SARS-COV 2 S protein boosts the neutralizing antibody response against the SARS-COV-2 S protein encoded by the original mRNA vaccine. Exposure to a mixture of the mRNA vaccine encoding the prefusion stabilized South African variant of the SARS-COV-2 S protein and the original mRNA encoding a prefusion stabilized S protein derived from the Wuhan strain was no more effective in boosting a neutralizing antibody response against the S protein of the original Wuhan strain than exposure to only the mRNA vaccine encoding the prefusion stabilized South African variant of the SARS-CoV-2 S protein.

[0714] Interestingly, immunization with an mRNA vaccine encoding the prefusion stabilized South African variant of the SARS-COV-2 S protein also resulted in high neutralization potencies against all other tested PsV, which expressed a naturally occurring variant of the SARS-CoV-2 S protein observed in South Africa and naturally occurring variants of the SARS-COV-2 S protein observed in Japan/Brazil and California. Surprisingly, the antigen response was so broad that PsVs expressing the S protein of SARS-COV-1 were also effectively neutralized by the NHP test sera. This was unexpected since the S protein of SARS-COV-1 is only 76% identical to the S protein of SARS-COV-2 Wuhan.

[0715] As can be seen from FIG. 17, in most instances the neutralizing antibody response was as effective against a variant S protein as against the S protein derived from the original Wuhan strain. Moreover, the magnitude of the neutralizing antibody response observed after booster immunization with an mRNA vaccine encoding a prefusion stabilized South African variant of the SARS-COV-2 S protein was similar or greater to the neutralizing antibody response induced at Day 35 in response to the original prime-boost immunization with the mRNA vaccine of Example 5.

[0716] These data demonstrate that subjects who have been previously immunized with a vaccine that elicits neutralizing antibodies against the S protein of SARS-COV-2 Wuhan and who are subsequently administered an mRNA vaccine comprising an optimized nucleotide sequence of the invention that encodes a prefusion stabilized South African variant of the SARS-COV-2 S protein are able to mount a broad neutralizing antibody response effective against a wide variety of S protein variants and therefore should be effectively protected against COVID-19 infections caused by naturally occurring variants of the original SARS-COV-2 Wuhan strain, as well as other β-coronaviruses, in particular those expressing a spike protein which binds to angiotensin-converting enzyme 2 (ACE2), such as SARS-COV-1.

1. A nucleic acid comprising an optimized nucleotide sequence encoding a full-length SARS-COV-2 spike protein which has been modified relative to naturally occurring full-length SARS-COV-2 spike protein of SEQ ID NO: 1 to remove the furin cleavage site and to mutate residues 986 and 987 to proline, wherein the optimized nucleotide sequence consists of codons associated with a usage frequency which is greater than or equal to 10%; wherein the optimized nucleotide sequence:
(i) does not contain a termination signal having one of the following nucleotide sequences:
5′-X₁ATCTX₂TX₃-3′, wherein X₁, X₂ and X₃ are independently selected from A, C, T or G; and 5′-X₁AUCUX₂UX₃-3′, wherein X₁, X₂ and X₃ are independently selected from A, C, U or G;
(ii) does not contain any negative cis-regulatory elements and negative repeat elements; and
(iii) has a codon adaptation index greater than 0.8;
wherein, when divided into non-overlapping 30 nucleotide-long portions, each portion of the optimized nucleotide sequence has a guanine cytosine content range of 30%-70%.

2. The nucleic acid of claim 1, wherein the optimized nucleotide sequence does not contain a termination signal having one of the following sequences: TATCTGTT; TTTTTT; AAGCTT; GAAGAGC; TCTAGA; UAUCUGUU; UUUUUU; AAGCUU; GAAGAGC; UCUAGA.

3. The nucleic acid of claim 1, wherein the full-length SARS-CoV-2 spike protein encoded by the optimized sequence further contains the L18F, D80A, D215G, L242-, A243-, L244-, K417N, E484K, N501Y, D614G and A701V mutations.

4. The nucleic acid of claim 1, wherein the nucleic acid is mRNA.

5. (canceled)

6. The nucleic acid of claim 1, wherein the optimized nucleotide sequence encodes an amino acid sequence comprising SEQ ID NO:11, optionally wherein the optimized nucleotide sequence has the nucleic acid sequence of SEQ ID NO: 44 or SEQ ID NO: 148; or wherein the optimized nucleotide sequence encodes an amino acid sequence comprising SEQ ID NO: 167, optionally wherein the optimized nucleotide sequence has the nucleic acid sequence of SEQ ID NO: 166 or SEQ ID NO: 173.

7.-16. (canceled)

17. A pharmaceutical composition comprising i) the nucleic acid of claim 1 and ii) a lipid nanoparticle, wherein the nucleic acid is encapsulated in the lipid nanoparticle.

18. (canceled)

19. The pharmaceutical composition of claim 17, wherein the lipid nanoparticle comprises a cationic lipid, a non-cationic lipid, a cholesterol-based lipid, and a PEG-modified lipid.

20.-35. (canceled)

36. The nucleic acid of claim 4, wherein the mRNA comprises an mRNA construct consisting of the following structural elements:
(i) a 5′ cap with the following structure: [chemical structure]
(ii) a 5′ untranslated region (5′ UTR) having the nucleic acid sequence of SEQ ID NO: 144;
(iii) a protein coding region having the nucleic acid sequence of SEQ ID NO: 148;
(iv) a 3′ untranslated region (3′ UTR) having the nucleic acid sequence of SEQ ID NO: 145; and
(v) a polyA tail.

37. The nucleic acid of claim 4, wherein the mRNA comprises an mRNA construct consisting of the following structural elements:
(i) a 5′ cap with the following structure: [chemical structure]
(ii) a 5′ untranslated region (5′ UTR) having the nucleic acid sequence of SEQ ID NO: 144;
(iii) a protein coding region having the nucleic acid sequence of SEQ ID NO: 173;
(iv) a 3′ untranslated region (3′ UTR) having the nucleic acid sequence of SEQ ID NO: 145; and
(v) a polyA tail.

38.-43. (canceled)

44. The pharmaceutical composition of claim 17 comprising the mRNA construct of claim 36 and/or the mRNA construct of claim 37.

45. The immunogenic composition according to claim 44 comprising between 5 μg and 200 μg of the mRNA construct(s).

46.-60. (canceled)

61. An immunogenic composition comprising at least two nucleic acids, wherein
1. the first nucleic acid comprises an optimized nucleotide sequence encoding a full-length SARS-COV-2 spike protein which has been modified relative to naturally occurring full-length SARS-COV-2 spike protein of SEQ ID NO: 1 to remove the furin cleavage site and to mutate residues 986 and 987 to proline; and
2. the second nucleic acid comprises an optimized nucleotide sequence encoding a full-length SARS-COV-2 spike protein which has been modified relative to naturally occurring full-length SARS-COV-2 spike protein of SEQ ID NO: 1 to remove the furin cleavage site and to mutate residues 986 and 987 to proline and further contains the L18F, D80A, D215G, L242-, A243-, L244-, K417N, E484K, N501Y, D614G and A701V mutations.

62. The immunogenic composition according to claim 61, wherein the first nucleic acid comprises an optimized nucleotide sequence which encodes an amino acid sequence comprising SEQ ID NO: 11, optionally wherein the optimized nucleotide sequence has the nucleic acid sequence of SEQ ID NO: 44 or SEQ ID NO: 148.

63. The immunogenic composition according to claim 61 or 62, wherein the second nucleic acid comprises an optimized nucleotide sequence that encodes an amino acid sequence comprising SEQ ID NO: 167, optionally wherein the optimized nucleotide sequence has the nucleic acid sequence of SEQ ID NO: 166 or SEQ ID NO: 173.

64. (canceled)

65. The immunogenic composition according to claim 61, wherein the optimized nucleotide sequence of the first nucleic acid has the nucleic acid sequence of SEQ ID NO: 148, and wherein the optimized nucleotide sequence of the second nucleic acid has the nucleic acid sequence of SEQ ID NO: 173.

66. (canceled)

67. (canceled)

68. The immunogenic composition according to claim 61, wherein the at least two nucleic acids are encapsulated in the same lipid nanoparticle, or in separate lipid nanoparticles.

69. (canceled)

70. The immunogenic composition of claim 68, wherein the lipid nanoparticle comprises a cationic lipid, a non-cationic lipid, a cholesterol-based lipid and a PEG-modified lipid.

71. The immunogenic composition according to claim 70, wherein the cationic lipid is selected from cKK-E12, cKK-E10, OF-Deg-Lin and OF-02; the non-cationic lipid is selected from DOPE and DEPE; the cholesterol-based lipid is cholesterol; and the PEG-modified lipid is DMG-PEG-2K.

72. The immunogenic composition according to claim 71, wherein the lipid nanoparticle comprises cKK-E10, DOPE, cholesterol and DMG-PEG2K at the molar ratios 40:30:28.5:1.5.

73. The immunogenic composition of claim 61 comprising at total of 7.5 μg, 15 μg, 45 μg or 135 μg of the at least two nucleic acids.

74.-77. (canceled)

78. A method of treating or preventing an infection caused by a β-coronavirus, said method comprising administering to a subject an effective amount of the pharmaceutical composition of claim 17, or the immunogenic composition of claim 61.

79. (canceled)

80. The method of claim 78, wherein the β-coronavirus is SARS-COV-2.

81.-89. (canceled)

90. A method of treating or preventing an infection caused by a β-coronavirus, said method comprising administering to a subject an effective amount of an immunogenic composition comprising an mRNA construct, wherein said mRNA construct comprises an optimized nucleotide sequence encoding a full-length SARS-COV-2 spike protein which has been modified relative to naturally occurring full-length SARS-COV-2 spike protein of SEQ ID NO: 1 to remove the furin cleavage site and to mutate residues 986 and 987 to proline and further contains the L18F, D80A, D215G, L242-, A243-, L244-, K417N, E484K, N501Y, D614G and A701V mutations.

91. The method of claim 90, wherein the optimized nucleotide sequence encodes an amino acid sequence comprising SEQ ID NO: 167, optionally wherein the optimized nucleotide sequence has the nucleic acid sequence of SEQ ID NO: 173.

92.-108. (canceled)

The application's sequence listing, which the Patent Office published only in electronic form, follows.

SEQUENCE LISTING (173 sequences)

SEQ ID NO: 1 - protein, 1273 aa, Artificial Sequence
  Synthetic
MFVFLVLLPLVSSQCVNLTTRTQLPPAYTNSFTRGVYYPDKVFRSSVLHSTQDLFLPFFSNVTWFHAIHVSGTNGTKRFDNPVLPFNDGVYFASTEKSNIIRGWIFGTTLDSKTQSLLIVNNATNVVIKVCEFQFCNDPFLGVYYHKNNKSWMESEFRVYSSANNCTFEYVSQPFLMDLEGKQGNFKNLREFVFKNIDGYFKIYSKHTPINLVRDLPQGFSALEPLVDLPIGINITRFQTLLALHRSYLTPGDSSSGWTAGAAAYYVGYLQPRTFLLKYNENGTITDAVDCALDPLSETKCTLKSFTVEKGIYQTSNFRVQPTESIVRFPNITNLCPFGEVFNATRFASVYAWNRKRISNCVADYSVLYNSASFSTFKCYGVSPTKLNDLCFTNVYADSFVIRGDEVRQIAPGQTGKIADYNYKLPDDFTGCVIAWNSNNLDSKVGGNYNYLYRLFRKSNLKPFERDISTEIYQAGSTPCNGVEGFNCYFPLQSYGFQPTNGVGYQPYRVVVLSFELLHAPATVCGPKKSTNLVKNKCVNFNFNGLTGTGVLTESNKKFLPFQQFGRDIADTTDAVRDPQTLEILDITPCSFGGVSVITPGTNTSNQVAVLYQDVNCTEVPVAIHADQLTPTWRVYSTGSNVFQTRAGCLIGAEHVNNSYECDIPIGAGICASYQTQTNSPRRARSVASQSIIAYTMSLGAENSVAYSNNSIAIPTNFTISVTTEILPVSMTKTSVDCTMYICGDSTECSNLLLQYGSFCTQLNRALTGIAVEQDKNTQEVFAQVKQIYKTPPIKDFGGFNFSQILPDPSKPSKRSFIEDLLFNKVTLADAGFIKQYGDCLGDIAARDLICAQKFNGLTVLPPLLTDEMIAQYTSALLAGTITSGWTFGAGAALQIPFAMQMAYRFNGIGVTQNVLYENQKLIANQFNSAIGKIQDSLSSTASALGKLQDVVNQNAQALNTLVKQLSSNFGAISSVLNDILSRLDKVEAEVQIDRLITGRLQSLQTYVTQQLIRAAEIRASANLAATKMSECVLGQSKRVDFCGKGYHLMSFPQSAPHGVVFLHVTYVPAQEKNFTTAPAICHDGKAHFPREGVFVSNGTHWFVTQRNFYEPQIITTDNTFVSGNCDVVIGIVNNTVYDPLQPELDSFKEELDKYFKNHTSPDVDLGDISGINASVVNIQKEIDRLNEVAKNLNESLIDLQELGKYEQYIKWPWYIWLGFIAGLIAIVMVTIMLCCMTSCCSCLKGCCSCGSCCKFDEDDSEPVLKGVKLHYT

SEQ ID NO: 2 - protein, 1208 aa, SARS-CoV-2
MFVFLVLLPLVSSQCVNLTTRTQLPPAYTNSFTRGVYYPDKVFRSSVLHSTQDLFLPFFSNVTWFHAIHVSGTNGTKRFDNPVLPFNDGVYFASTEKSNIIRGWIFGTTLDSKTQSLLIVNNATNVVIKVCEFQFCNDPFLGVYYHKNNKSWMESEFRVYSSANNCTFEYVSQPFLMDLEGKQGNFKNLREFVFKNIDGYFKIYSKHTPINLVRDLPQGFSALEPLVDLPIGINITRFQTLLALHRSYLTPGDSSSGWTAGAAAYYVGYLQPRTFLLKYNENGTITDAVDCALDPLSETKCTLKSFTVEKGIYQTSNFRVQPTESIVRFPNITNLCPFGEVFNATRFASVYAWNRKRISNCVADYSVLYNSASFSTFKCYGVSPTKLNDLCFTNVYADSFVIRGDEVRQIAPGQTGKIADYNYKLPDDFTGCVIAWNSNNLDSKVGGNYNYLYRLFRKSNLKPFERDISTEIYQAGSTPCNGVEGFNCYFPLQSYGFQPTNGVGYQPYRVVVLSFELLHAPATVCGPKKSTNLVKNKCVNFNFNGLTGTGVLTESNKKFLPFQQFGRDIADTTDAVRDPQTLEILDITPCSFGGVSVITPGTNTSNQVAVLYQDVNCTEVPVAIHADQLTPTWRVYSTGSNVFQTRAGCLIGAEHVNNSYECDIPIGAGICASYQTQTNSPRRARSVASQSIIAYTMSLGAENSVAYSNNSIAIPTNFTISVTTEILPVSMTKTSVDCTMYICGDSTECSNLLLQYGSFCTQLNRALTGIAVEQDKNTQEVFAQVKQIYKTPPIKDFGGFNFSQILPDPSKPSKRSFIEDLLFNKVTLADAGFIKQYGDCLGDIAARDLICAQKFNGLTVLPPLLTDEMIAQYTSALLAGTITSGWTFGAGAALQIPFAMQMAYRFNGIGVTQNVLYENQKLIANQFNSAIGKIQDSLSSTASALGKLQDVVNQNAQALNTLVKQLSSNFGAISSVLNDILSRLDKVEAEVQIDRLITGRLQSLQTYVTQQLIRAAEIRASANLAATKMSECVLGQSKRVDFCGKGYHLMSFPQSAPHGVVFLHVTYVPAQEKNFTTAPAICHDGKAHFPREGVFVSNGTHWFVTQRNFYEPQIITTDNTFVSGNCDVVIGIVNNTVYDPLQPELDSFKEELDKYFKNHTSPDVDLGDISGINASVVNIQKEIDRLNEVAKNLNESLIDLQELGKYEQ

SEQ ID NO: 3 - protein, 681 aa, SARS-CoV-2
MFVFLVLLPLVSSQCVNLTTRTQLPPAYTNSFTRGVYYPDKVFRSSVLHSTQDLFLPFFSNVTWFHAIHVSGTNGTKRFDNPVLPFNDGVYFASTEKSNIIRGWIFGTTLDSKTQSLLIVNNATNVVIKVCEFQFCNDPFLGVYYHKNNKSWMESEFRVYSSANNCTFEYVSQPFLMDLEGKQGNFKNLREFVFKNIDGYFKIYSKHTPINLVRDLPQGFSALEPLVDLPIGINITRFQTLLALHRSYLTPGDSSSGWTAGAAAYYVGYLQPRTFLLKYNENGTITDAVDCALDPLSETKCTLKSFTVEKGIYQTSNFRVQPTESIVRFPNITNLCPFGEVFNATRFASVYAWNRKRISNCVADYSVLYNSASFSTFKCYGVSPTKLNDLCFTNVYADSFVIRGDEVRQIAPGQTGKIADYNYKLPDDFTGCVIAWNSNNLDSKVGGNYNYLYRLFRKSNLKPFERDISTEIYQAGSTPCNGVEGFNCYFPLQSYGFQPTNGVGYQPYRVVVLSFELLHAPATVCGPKKSTNLVKNKCVNFNFNGLTGTGVLTESNKKFLPFQQFGRDIADTTDAVRDPQTLEILDITPCSFGGVSVITPGTNTSNQVAVLYQDVNCTEVPVAIHADQLTPTWRVYSTGSNVFQTRAGCLIGAEHVNNSYECDIPIGAGICASYQTQTNSP

SEQ ID NO: 4 - protein, 589 aa, SARS-CoV-2
MSVASQSIIAYTMSLGAENSVAYSNNSIAIPTNFTISVTTEILPVSMTKTSVDCTMYICGDSTECSNLLLQYGSFCTQLNRALTGIAVEQDKNTQEVFAQVKQIYKTPPIKDFGGFNFSQILPDPSKPSKRSFIEDLLFNKVTLADAGFIKQYGDCLGDIAARDLICAQKFNGLTVLPPLLTDEMIAQYTSALLAGTITSGWTFGAGAALQIPFAMQMAYRFNGIGVTQNVLYENQKLIANQFNSAIGKIQDSLSSTASALGKLQDVVNQNAQALNTLVKQLSSNFGAISSVLNDILSRLDKVEAEVQIDRLITGRLQSLQTYVTQQLIRAAEIRASANLAATKMSECVLGQSKRVDFCGKGYHLMSFPQSAPHGVVFLHVTYVPAQEKNFTTAPAICHDGKAHFPREGVFVSNGTHWFVTQRNFYEPQIITTDNTFVSGNCDVVIGIVNNTVYDPLQPELDSFKEELDKYFKNHTSPDVDLGDISGINASVVNIQKEIDRLNEVAKNLNESLIDLQELGKYEQYIKWPWYIWLGFIAGLIAIVMVTIMLCCMTSCCSCLKGCCSCGSCCKFDEDDSEPVLKGVKLHYT

SEQ ID NO: 5 - protein, 394 aa, SARS-CoV-2
MSFIEDLLFNKVTLADAGFIKQYGDCLGDIAARDLICAQKFNGLTVLPPLLTDEMIAQYTSALLAGTITSGWTFGAGAALQIPFAMQMAYRFNGIGVTQNVLYENQKLIANQFNSAIGKIQDSLSSTASALGKLQDVVNQNAQALNTLVKQLSSNFGAISSVLNDILSRLDKVEAEVQIDRLITGRLQSLQTYVTQQLIRAAEIRASANLAATKMSECVLGQSKRVDFCGKGYHLMSFPQSAPHGVVFLHVTYVPAQEKNFTTAPAICHDGKAHFPREGVFVSNGTHWFVTQRNFYEPQIITTDNTFVSGNCDVVIGIVNNTVYDPLQPELDSFKEELDKYFKNHTSPDVDLGDISGINASVVNIQKEIDRLNEVAKNLNESLIDLQELGKYEQ

SEQ ID NO: 6 - protein, 193 aa, SARS-CoV-2
MPNITNLCPFGEVFNATRFASVYAWNRKRISNCVADYSVLYNSASFSTFKCYGVSPTKLNDLCFTNVYADSFVIRGDEVRQIAPGQTGKIADYNYKLPDDFTGCVIAWNSNNLDSKVGGNYNYLYRLFRKSNLKPFERDISTEIYQAGSTPCNGVEGFNCYFPLQSYGFQPTNGVGYQPYRVVVLSFELLHAP

SEQ ID NO: 7 - protein, 15 aa, SARS-CoV-2
MFVFLVLLPLVSSQC

SEQ ID NO: 8 - protein, 207 aa, Artificial Sequence
  Synthetic
MFVFLVLLPLVSSQCPNITNLCPFGEVFNATRFASVYAWNRKRISNCVADYSVLYNSASFSTFKCYGVSPTKLNDLCFTNVYADSFVIRGDEVRQIAPGQTGKIADYNYKLPDDFTGCVIAWNSNNLDSKVGGNYNYLYRLFRKSNLKPFERDISTEIYQAGSTPCNGVEGFNCYFPLQSYGFQPTNGVGYQPYRVVVLSFELLHAP

SEQ ID NO: 9 - protein, 1273 aa, Artificial Sequence
  Synthetic
MFVFLVLLPLVSSQCVNLTTRTQLPPAYTNSFTRGVYYPDKVFRSSVLHSTQDLFLPFFSNVTWFHAIHVSGTNGTKRFDNPVLPFNDGVYFASTEKSNIIRGWIFGTTLDSKTQSLLIVNNATNVVIKVCEFQFCNDPFLGVYYHKNNKSWMESEFRVYSSANNCTFEYVSQPFLMDLEGKQGNFKNLREFVFKNIDGYFKIYSKHTPINLVRDLPQGFSALEPLVDLPIGINITRFQTLLALHRSYLTPGDSSSGWTAGAAAYYVGYLQPRTFLLKYNENGTITDAVDCALDPLSETKCTLKSFTVEKGIYQTSNFRVQPTESIVRFPNITNLCPFGEVFNATRFASVYAWNRKRISNCVADYSVLYNSASFSTFKCYGVSPTKLNDLCFTNVYADSFVIRGDEVRQIAPGQTGKIADYNYKLPDDFTGCVIAWNSNNLDSKVGGNYNYLYRLFRKSNLKPFERDISTEIYQAGSTPCNGVEGFNCYFPLQSYGFQPTNGVGYQPYRVVVLSFELLHAPATVCGPKKSTNLVKNKCVNFNFNGLTGTGVLTESNKKFLPFQQFGRDIADTTDAVRDPQTLEILDITPCSFGGVSVITPGTNTSNQVAVLYQDVNCTEVPVAIHADQLTPTWRVYSTGSNVFQTRAGCLIGAEHVNNSYECDIPIGAGICASYQTQTNSPGSASSVASQSIIAYTMSLGAENSVAYSNNSIAIPTNFTISVTTEILPVSMTKTSVDCTMYICGDSTECSNLLLQYGSFCTQLNRALTGIAVEQDKNTQEVFAQVKQIYKTPPIKDFGGFNFSQILPDPSKPSKRSFIEDLLFNKVTLADAGFIKQYGDCLGDIAARDLICAQKFNGLTVLPPLLTDEMIAQYTSALLAGTITSGWTFGAGAALQIPFAMQMAYRFNGIGVTQNVLYENQKLIANQFNSAIGKIQDSLSSTASALGKLQDVVNQNAQALNTLVKQLSSNFGAISSVLNDILSRLDKVEAEVQIDRLITGRLQSLQTYVTQQLIRAAEIRASANLAATKMSECVLGQSKRVDFCGKGYHLMSFPQSAPHGVVFLHVTYVPAQEKNFTTAPAICHDGKAHFPREGVFVSNGTHWFVTQRNFYEPQIITTDNTFVSGNCDVVIGIVNNTVYDPLQPELDSFKEELDKYFKNHTSPDVDLGDISGINASVVNIQKEIDRLNEVAKNLNESLIDLQELGKYEQYIKWPWYIWLGFIAGLIAIVMVTIMLCCMTSCCSCLKGCCSCGSCCKFDEDDSEPVLKGVKLHYT

SEQ ID NO: 10 - protein, 1273 aa, Artificial Sequence
  Synthetic
MFVFLVLLPLVSSQCVNLTTRTQLPPAYTNSFTRGVYYPDKVFRSSVLHSTQDLFLPFFSNVTWFHAIHVSGTNGTKRFDNPVLPFNDGVYFASTEKSNIIRGWIFGTTLDSKTQSLLIVNNATNVVIKVCEFQFCNDPFLGVYYHKNNKSWMESEFRVYSSANNCTFEYVSQPFLMDLEGKQGNFKNLREFVFKNIDGYFKIYSKHTPINLVRDLPQGFSALEPLVDLPIGINITRFQTLLALHRSYLTPGDSSSGWTAGAAAYYVGYLQPRTFLLKYNENGTITDAVDCALDPLSETKCTLKSFTVEKGIYQTSNFRVQPTESIVRFPNITNLCPFGEVFNATRFASVYAWNRKRISNCVADYSVLYNSASFSTFKCYGVSPTKLNDLCFTNVYADSFVIRGDEVRQIAPGQTGKIADYNYKLPDDFTGCVIAWNSNNLDSKVGGNYNYLYRLFRKSNLKPFERDISTEIYQAGSTPCNGVEGFNCYFPLQSYGFQPTNGVGYQPYRVVVLSFELLHAPATVCGPKKSTNLVKNKCVNFNFNGLTGTGVLTESNKKFLPFQQFGRDIADTTDAVRDPQTLEILDITPCSFGGVSVITPGTNTSNQVAVLYQDVNCTEVPVAIHADQLTPTWRVYSTGSNVFQTRAGCLIGAEHVNNSYECDIPIGAGICASYQTQTNSPRRARSVASQSIIAYTMSLGAENSVAYSNNSIAIPTNFTISVTTEILPVSMTKTSVDCTMYICGDSTECSNLLLQYGSFCTQLNRALTGIAVEQDKNTQEVFAQVKQIYKTPPIKDFGGFNFSQILPDPSKPSKRSFIEDLLFNKVTLADAGFIKQYGDCLGDIAARDLICAQKFNGLTVLPPLLTDEMIAQYTSALLAGTITSGWTFGAGAALQIPFAMQMAYRFNGIGVTQNVLYENQKLIANQFNSAIGKIQDSLSSTASALGKLQDVVNQNAQALNTLVKQLSSNFGAISSVLNDILSRLDPPEAEVQIDRLITGRLQSLQTYVTQQLIRAAEIRASANLAATKMSECVLGQSKRVDFCGKGYHLMSFPQSAPHGVVFLHVTYVPAQEKNFTTAPAICHDGKAHFPREGVFVSNGTHWFVTQRNFYEPQIITTDNTFVSGNCDVVIGIVNNTVYDPLQPELDSFKEELDKYFKNHTSPDVDLGDISGINASVVNIQKEIDRLNEVAKNLNESLIDLQELGKYEQYIKWPWYIWLGFIAGLIAIVMVTIMLCCMTSCCSCLKGCCSCGSCCKFDEDDSEPVLKGVKLHYT

SEQ ID NO: 11 - protein, 1273 aa, Artificial Sequence
  Synthetic
MFVFLVLLPLVSSQCVNLTTRTQLPPAYTNSFTRGVYYPDKVFRSSVLHSTQDLFLPFFSNVTWFHAIHVSGTNGTKRFDNPVLPFNDGVYFASTEKSNIIRGWIFGTTLDSKTQSLLIVNNATNVVIKVCEFQFCNDPFLGVYYHKNNKSWMESEFRVYSSANNCTFEYVSQPFLMDLEGKQGNFKNLREFVFKNIDGYFKIYSKHTPINLVRDLPQGFSALEPLVDLPIGINITRFQTLLALHRSYLTPGDSSSGWTAGAAAYYVGYLQPRTFLLKYNENGTITDAVDCALDPLSETKCTLKSFTVEKGIYQTSNFRVQPTESIVRFPNITNLCPFGEVFNATRFASVYAWNRKRISNCVADYSVLYNSASFSTFKCYGVSPTKLNDLCFTNVYADSFVIRGDEVRQIAPGQTGKIADYNYKLPDDFTGCVIAWNSNNLDSKVGGNYNYLYRLFRKSNLKPFERDISTEIYQAGSTPCNGVEGFNCYFPLQSYGFQPTNGVGYQPYRVVVLSFELLHAPATVCGPKKSTNLVKNKCVNFNFNGLTGTGVLTESNKKFLPFQQFGRDIADTTDAVRDPQTLEILDITPCSFGGVSVITPGTNTSNQVAVLYQDVNCTEVPVAIHADQLTPTWRVYSTGSNVFQTRAGCLIGAEHVNNSYECDIPIGAGICASYQTQTNSPGSASSVASQSIIAYTMSLGAENSVAYSNNSIAIPTNFTISVTTEILPVSMTKTSVDCTMYICGDSTECSNLLLQYGSFCTQLNRALTGIAVEQDKNTQEVFAQVKQIYKTPPIKDFGGFNFSQILPDPSKPSKRSFIEDLLFNKVTLADAGFIKQYGDCLGDIAARDLICAQKFNGLTVLPPLLTDEMIAQYTSALLAGTITSGWTFGAGAALQIPFAMQMAYRFNGIGVTQNVLYENQKLIANQFNSAIGKIQDSLSSTASALGKLQDVVNQNAQALNTLVKQLSSNFGAISSVLNDILSRLDPPEAEVQIDRLITGRLQSLQTYVTQQLIRAAEIRASANLAATKMSECVLGQSKRVDFCGKGYHLMSFPQSAPHGVVFLHVTYVPAQEKNFTTAPAICHDGKAHFPREGVFVSNGTHWFVTQRNFYEPQIITTDNTFVSGNCDVVIGIVNNTVYDPLQPELDSFKEELDKYFKNHTSPDVDLGDISGINASVVNIQKEIDRLNEVAKNLNESLIDLQELGKYEQYIKWPWYIWLGFIAGLIAIVMVTIMLCCMTSCCSCLKGCCSCGSCCKFDEDDSEPVLKGVKLHYT

SEQ ID NO: 12 - protein, 1208 aa, Artificial Sequence
  Synthetic
MFVFLVLLPLVSSQCVNLTTRTQLPPAYTNSFTRGVYYPDKVFRSSVLHSTQDLFLPFFSNVTWFHAIHVSGTNGTKRFDNPVLPFNDGVYFASTEKSNIIRGWIFGTTLDSKTQSLLIVNNATNVVIKVCEFQFCNDPFLGVYYHKNNKSWMESEFRVYSSANNCTFEYVSQPFLMDLEGKQGNFKNLREFVFKNIDGYFKIYSKHTPINLVRDLPQGFSALEPLVDLPIGINITRFQTLLALHRSYLTPGDSSSGWTAGAAAYYVGYLQPRTFLLKYNENGTITDAVDCALDPLSETKCTLKSFTVEKGIYQTSNFRVQPTESIVRFPNITNLCPFGEVFNATRFASVYAWNRKRISNCVADYSVLYNSASFSTFKCYGVSPTKLNDLCFTNVYADSFVIRGDEVRQIAPGQTGKIADYNYKLPDDFTGCVIAWNSNNLDSKVGGNYNYLYRLFRKSNLKPFERDISTEIYQAGSTPCNGVEGFNCYFPLQSYGFQPTNGVGYQPYRVVVLSFELLHAPATVCGPKKSTNLVKNKCVNFNFNGLTGTGVLTESNKKFLPFQQFGRDIADTTDAVRDPQTLEILDITPCSFGGVSVITPGTNTSNQVAVLYQDVNCTEVPVAIHADQLTPTWRVYSTGSNVFQTRAGCLIGAEHVNNSYECDIPIGAGICASYQTQTNSPGSASSVASQSIIAYTMSLGAENSVAYSNNSIAIPTNFTISVTTEILPVSMTKTSVDCTMYICGDSTECSNLLLQYGSFCTQLNRALTGIAVEQDKNTQEVFAQVKQIYKTPPIKDFGGFNFSQILPDPSKPSKRSFIEDLLFNKVTLADAGFIKQYGDCLGDIAARDLICAQKFNGLTVLPPLLTDEMIAQYTSALLAGTITSGWTFGAGAALQIPFAMQMAYRFNGIGVTQNVLYENQKLIANQFNSAIGKIQDSLSSTASALGKLQDVVNQNAQALNTLVKQLSSNFGAISSVLNDILSRLDPPEAEVQIDRLITGRLQSLQTYVTQQLIRAAEIRASANLAATKMSECVLGQSKRVDFCGKGYHLMSFPQSAPHGVVFLHVTYVPAQEKNFTTAPAICHDGKAHFPREGVFVSNGTHWFVTQRNFYEPQIITTDNTFVSGNCDVVIGIVNNTVYDPLQPELDSFKEELDKYFKNHTSPDVDLGDISGINASVVNIQKEIDRLNEVAKNLNESLIDLQELGKYEQ

SEQ ID NO: 13 - protein, 27 aa, Artificial Sequence
  Synthetic
GYIPEAPRDGQAYVRKDGEWVLLSTFL

SEQ ID NO: 14 - protein, 1235 aa, Artificial Sequence
  Synthetic
MFVFLVLLPLVSSQCVNLTTRTQLPPAYTNSFTRGVYYPDKVFRSSVLHSTQDLFLPFFSNVTWFHAIHVSGTNGTKRFDNPVLPFNDGVYFASTEKSNIIRGWIFGTTLDSKTQSLLIVNNATNVVIKVCEFQFCNDPFLGVYYHKNNKSWMESEFRVYSSANNCTFEYVSQPFLMDLEGKQGNFKNLREFVFKNIDGYFKIYSKHTPINLVRDLPQGFSALEPLVDLPIGINITRFQTLLALHRSYLTPGDSSSGWTAGAAAYYVGYLQPRTFLLKYNENGTITDAVDCALDPLSETKCTLKSFTVEKGIYQTSNFRVQPTESIVRFPNITNLCPFGEVFNATRFASVYAWNRKRISNCVADYSVLYNSASFSTFKCYGVSPTKLNDLCFTNVYADSFVIRGDEVRQIAPGQTGKIADYNYKLPDDFTGCVIAWNSNNLDSKVGGNYNYLYRLFRKSNLKPFERDISTEIYQAGSTPCNGVEGFNCYFPLQSYGFQPTNGVGYQPYRVVVLSFELLHAPATVCGPKKSTNLVKNKCVNFNFNGLTGTGVLTESNKKFLPFQQFGRDIADTTDAVRDPQTLEILDITPCSFGGVSVITPGTNTSNQVAVLYQDVNCTEVPVAIHADQLTPTWRVYSTGSNVFQTRAGCLIGAEHVNNSYECDIPIGAGICASYQTQTNSPRRARSVASQSIIAYTMSLGAENSVAYSNNSIAIPTNFTISVTTEILPVSMTKTSVDCTMYICGDSTECSNLLLQYGSFCTQLNRALTGIAVEQDKNTQEVFAQVKQIYKTPPIKDFGGFNFSQILPDPSKPSKRSFIEDLLFNKVTLADAGFIKQYGDCLGDIAARDLICAQKFNGLTVLPPLLTDEMIAQYTSALLAGTITSGWTFGAGAALQIPFAMQMAYRFNGIGVTQNVLYENQKLIANQFNSAIGKIQDSLSSTASALGKLQDVVNQNAQALNTLVKQLSSNFGAISSVLNDILSRLDKVEAEVQIDRLITGRLQSLQTYVTQQLIRAAEIRASANLAATKMSECVLGQSKRVDFCGKGYHLMSFPQSAPHGVVFLHVTYVPAQEKNFTTAPAICHDGKAHFPREGVFVSNGTHWFVTQRNFYEPQIITTDNTFVSGNCDVVIGIVNNTVYDPLQPELDSFKEELDKYFKNHTSPDVDLGDISGINASVVNIQKEIDRLNEVAKNLNESLIDLQELGKYEQGYIPEAPRDGQAYVRKDGEWVLLSTFL

SEQ ID NO: 15 - protein, 435 aa, Artificial Sequence
  Synthetic
MFVFLVLLPLVSSQCSFIEDLLFNKVTLADAGFIKQYGDCLGDIAARDLICAQKFNGLTVLPPLLTDEMIAQYTSALLAGTITSGWTFGAGAALQIPFAMQMAYRFNGIGVTQNVLYENQKLIANQFNSAIGKIQDSLSSTASALGKLQDVVNQNAQALNTLVKQLSSNFGAISSVLNDILSRLDKVEAEVQIDRLITGRLQSLQTYVTQQLIRAAEIRASANLAATKMSECVLGQSKRVDFCGKGYHLMSFPQSAPHGVVFLHVTYVPAQEKNFTTAPAICHDGKAHFPREGVFVSNGTHWFVTQRNFYEPQIITTDNTFVSGNCDVVIGIVNNTVYDPLQPELDSFKEELDKYFKNHTSPDVDLGDISGINASVVNIQKEIDRLNEVAKNLNESLIDLQELGKYEQGYIPEAPRDGQAYVRKDGEWVLLSTFL

SEQ ID NO: 16 - protein, 1235 aa, Artificial Sequence
  Synthetic
MFVFLVLLPLVSSQCVNLTTRTQLPPAYTNSFTRGVYYPDKVFRSSVLHSTQDLFLPFFSNVTWFHAIHVSGTNGTKRFDNPVLPFNDGVYFASTEKSNIIRGWIFGTTLDSKTQSLLIVNNATNVVIKVCEFQFCNDPFLGVYYHKNNKSWMESEFRVYSSANNCTFEYVSQPFLMDLEGKQGNFKNLREFVFKNIDGYFKIYSKHTPINLVRDLPQGFSALEPLVDLPIGINITRFQTLLALHRSYLTPGDSSSGWTAGAAAYYVGYLQPRTFLLKYNENGTITDAVDCALDPLSETKCTLKSFTVEKGIYQTSNFRVQPTESIVRFPNITNLCPFGEVFNATRFASVYAWNRKRISNCVADYSVLYNSASFSTFKCYGVSPTKLNDLCFTNVYADSFVIRGDEVRQIAPGQTGKIADYNYKLPDDFTGCVIAWNSNNLDSKVGGNYNYLYRLFRKSNLKPFERDISTEIYQAGSTPCNGVEGFNCYFPLQSYGFQPTNGVGYQPYRVVVLSFELLHAPATVCGPKKSTNLVKNKCVNFNFNGLTGTGVLTESNKKFLPFQQFGRDIADTTDAVRDPQTLEILDITPCSFGGVSVITPGTNTSNQVAVLYQDVNCTEVPVAIHADQLTPTWRVYSTGSNVFQTRAGCLIGAEHVNNSYECDIPIGAGICASYQTQTNSPRRARSVASQSIIAYTMSLGAENSVAYSNNSIAIPTNFTISVTTEILPVSMTKTSVDCTMYICGDSTECSNLLLQYGSFCTQLNRALTGIAVEQDKNTQEVFAQVKQIYKTPPIKDFGGFNFSQILPDPSKPSKRSFIEDLLFNKVTLADAGFIKQYGDCLGDIAARDLICAQKFNGLTVLPPLLTDEMIAQYTSALLAGTITSGWTFGAGAALQIPFAMQMAYRFNGIGVTQNVLYENQKLIANQFNSAIGKIQDSLSSTASALGKLQDVVNQNAQALNTLVKQLSSNFGAISSVLNDILSRLDPPEAEVQIDRLITGRLQSLQTYVTQQLIRAAEIRASANLAATKMSECVLGQSKRVDFCGKGYHLMSFPQSAPHGVVFLHVTYVPAQEKNFTTAPAICHDGKAHFPREGVFVSNGTHWFVTQRNFYEPQIITTDNTFVSGNCDVVIGIVNNTVYDPLQPELDSFKEELDKYFKNHTSPDVDLGDISGINASVVNIQKEIDRLNEVAKNLNESLIDLQELGKYEQGYIPEAPRDGQAYVRKDGEWVLLSTFL

SEQ ID NO: 17 - protein, 1235 aa, Artificial Sequence
  Synthetic
MFVFLVLLPLVSSQCVNLTTRTQLPPAYTNSFTRGVYYPDKVFRSSVLHSTQDLFLPFFSNVTWFHAIHVSGTNGTKRFDNPVLPFNDGVYFASTEKSNIIRGWIFGTTLDSKTQSLLIVNNATNVVIKVCEFQFCNDPFLGVYYHKNNKSWMESEFRVYSSANNCTFEYVSQPFLMDLEGKQGNFKNLREFVFKNIDGYFKIYSKHTPINLVRDLPQGFSALEPLVDLPIGINITRFQTLLALHRSYLTPGDSSSGWTAGAAAYYVGYLQPRTFLLKYNENGTITDAVDCALDPLSETKCTLKSFTVEKGIYQTSNFRVQPTESIVRFPNITNLCPFGEVFNATRFASVYAWNRKRISNCVADYSVLYNSASFSTFKCYGVSPTKLNDLCFTNVYADSFVIRGDEVRQIAPGQTGKIADYNYKLPDDFTGCVIAWNSNNLDSKVGGNYNYLYRLFRKSNLKPFERDISTEIYQAGSTPCNGVEGFNCYFPLQSYGFQPTNGVGYQPYRVVVLSFELLHAPATVCGPKKSTNLVKNKCVNFNFNGLTGTGVLTESNKKFLPFQQFGRDIADTTDAVRDPQTLEILDITPCSFGGVSVITPGTNTSNQVAVLYQDVNCTEVPVAIHADQLTPTWRVYSTGSNVFQTRAGCLIGAEHVNNSYECDIPIGAGICASYQTQTNSPGSASSVASQSIIAYTMSLGAENSVAYSNNSIAIPTNFTISVTTEILPVSMTKTSVDCTMYICGDSTECSNLLLQYGSFCTQLNRALTGIAVEQDKNTQEVFAQVKQIYKTPPIKDFGGFNFSQILPDPSKPSKRSFIEDLLFNKVTLADAGFIKQYGDCLGDIAARDLICAQKFNGLTVLPPLLTDEMIAQYTSALLAGTITSGWTFGAGAALQIPFAMQMAYRFNGIGVTQNVLYENQKLIANQFNSAIGKIQDSLSSTASALGKLQDVVNQNAQALNTLVKQLSSNFGAISSVLNDILSRLDPPEAEVQIDRLITGRLQSLQTYVTQQLIRAAEIRASANLAATKMSECVLGQSKRVDFCGKGYHLMSFPQSAPHGVVFLHVTYVPAQEKNFTTAPAICHDGKAHFPREGVFVSNGTHWFVTQRNFYEPQIITTDNTFVSGNCDVVIGIVNNTVYDPLQPELDSFKEELDKYFKNHTSPDVDLGDISGINASVVNIQKEIDRLNEVAKNLNESLIDLQELGKYEQGYIPEAPRDGQAYVRKDGEWVLLSTFL

SEQ ID NO: 18 - protein, 231 aa, Artificial Sequence
  Synthetic
PKSCDKTHTCPPCPAPELLGGPSVFLFPPKPKDTLMISRTPEVTCVVVDVSHEDPEVKFNWYVDGVEVHNAKTKPREEQYNSTYRVVSVLTVLHQDWLNGKEYKCKVSNKALPAPIEKTISKAKGQPREPQVYTLPPSRDELTKNQVSLTCLVKGFYPSDIAVEWESNGQPENNYKTTPPVLDSDGSFFLYSKLTVDKSRWQQGNVFSCSVMHEALHNHYTQKSLSLSPGK

SEQ ID NO: 19 - protein, 423 aa, Artificial Sequence
  Synthetic
MNITNLCPFGEVFNATRFASVYAWNRKRISNCVADYSVLYNSASFSTFKCYGVSPTKLNDLCFTNVYADSFVIRGDEVRQIAPGQTGKIADYNYKLPDDFTGCVIAWNSNNLDSKVGGNYNYLYRLFRKSNLKPFERDISTEIYQAGSTPCNGVEGFNCYFPLQSYGFQPTNGVGYQPYRVVVLSFELLHAPPKSCDKTHTCPPCPAPELLGGPSVFLFPPKPKDTLMISRTPEVTCVVVDVSHEDPEVKFNWYVDGVEVHNAKTKPREEQYNSTYRVVSVLTVLHQDWLNGKEYKCKVSNKALPAPIEKTISKAKGQPREPQVYTLPPSRDELTKNQVSLTCLVKGFYPSDIAVEWESNGQPENNYKTTPPVLDSDGSFFLYSKLTVDKSRWQQGNVFSCSVMHEALHNHYTQKSLSLSPGK

SEQ ID NO: 20 - protein, 438 aa, Artificial Sequence
  Synthetic
MFVFLVLLPLVSSQCPNITNLCPFGEVFNATRFASVYAWNRKRISNCVADYSVLYNSASFSTFKCYGVSPTKLNDLCFTNVYADSFVIRGDEVRQIAPGQTGKIADYNYKLPDDFTGCVIAWNSNNLDSKVGGNYNYLYRLFRKSNLKPFERDISTEIYQAGSTPCNGVEGFNCYFPLQSYGFQPTNGVGYQPYRVVVLSFELLHAPPKSCDKTHTCPPCPAPELLGGPSVFLFPPKPKDTLMISRTPEVTCVVVDVSHEDPEVKFNWYVDGVEVHNAKTKPREEQYNSTYRVVSVLTVLHQDWLNGKEYKCKVSNKALPAPIEKTISKAKGQPREPQVYTLPPSRDELTKNQVSLTCLVKGFYPSDIAVEWESNGQPENNYKTTPPVLDSDGSFFLYSKLTVDKSRWQQGNVFSCSVMHEALHNHYTQKSLSLSPGK

SEQ ID NO: 21 - protein, 18 aa, Artificial Sequence
  Synthetic
SFIEDLLFNKVTLADAGF

SEQ ID NO: 22 - protein, 26 aa, Artificial Sequence
  Synthetic
LLFNKVTLADAGFIKQYGDCLGDIAA

SEQ ID NO: 23 - protein, 33 aa, Artificial Sequence
  Synthetic
PAICHDGKAHFPREGVFVSNGTHWFVTQRNFYE

SEQ ID NO: 24 - protein, 32 aa, Artificial Sequence
  Synthetic
GGFNFSQILPDPSKPSKRSFIEDLLFNKVTLA

SEQ ID NO: 25 - protein, 142 aa, Artificial Sequence
  Synthetic
MLLFNKVTLADAGFIKQYGDCLGDIAAGGGGSSFIEDLLFNKVTLADAGFGGGGSPAICHDGKAHFPREGVFVSNGTHWFVTQRNFYEGGGGSSFIEDLLFNKVTLADAGFGGGGSLLFNKVTLADAGFIKQYGDCLGDIAA

SEQ ID NO: 26 - DNA, 1137 bp, Artificial Sequence
  Synthetic
atgctgctgtttaacaaagtgactctggcagacgcaggctttatcaagcagtacggagactgtctcggggacattgcagccggcggcggaggctcatctttcattgaggacctgctgttcaacaaggtcactctggcagatgccggattcggaggagggggatctccagctatctgccatgacggaaaggctcattttcctcgggagggtgtgtttgtgtccaacggaacccattggttcgtcacacagcgcaacttctatgaaggaggggggggctccagcttcatcgaggacctgctctttaacaaagtgaccctggccgatgctggatttgggggagggggatccctgctgttcaacaaagttacactggccgacgcaggcttcatcaaacagtacggcgattgtttaggggacatcgccgctggcggcggaggatcacctaagtcctgcgacaaaacccatacatgtccaccatgcccagctcctgaactgctcggcgggcctagtgttttcctcttccctcctaagcccaaggataccctcatgatctctcgcacaccagaagtgacctgcgtggtcgtggatgtctctcacgaggatcctgaagtgaagtttaactggtatgtcgacggagtggaagtgcacaacgccaagacaaagccaagagaagaacaatacaattctacttatagggtggtgtctgtgctgacagtgctgcaccaggattggctgaatggaaaagaatataagtgtaaggtctctaacaaggccctgcccgctccaattgagaagacaatttccaaggccaaggggcagcctcgggaacctcaggtgtacacactgcccccatccagggatgaactgactaaaaatcaggtgtctctgacatgcctggtgaaagggttttatccaagtgacattgctgtggagtgggagtctaatgggcagcctgaaaataactacaagaccacaccaccagtgctcgatagcgacgggtctttctttctgtattctaaactgaccgtggataaatctcggtggcagcagggaaacgtgttttcttgctcagtgatgcacgaagctctgcacaatcactatacacagaaatccctgtccctgtctccaggcaaataa

SEQ ID NO: 27 - protein, 104 aa, Artificial Sequence
  Synthetic
MSFIEDLLFNKVTLADAGFIKQYGDCLGDIAAGGGGSSFIEDLLFNKVTLADAGFIKQYGDCLGDIAAGGGGSSFIEDLLFNKVTLADAGFIKQYGDCLGDIAA

SEQ ID NO: 28 - DNA, 315 bp, Artificial Sequence
  Synthetic
atgtccttcattgaggacctgctgtttaataaggtgaccctggccgacgctgggttcatcaaacagtatggagattgtctgggagatattgcagcaggcgggggcggcagcagctttattgaggacctcctgttcaacaaggtgacccttgccgacgcagggtttattaagcagtatggcgactgtctgggagacattgcagccggcggcggcgggtcttcttttatcgaggacctgctgttcaacaaggtgacactggccgacgcaggctttattaagcagtacggggactgcctgggagacattgccgcctga

SEQ ID NO: 29 - DNA, 3822 bp, Artificial Sequence
  Synthetic
atgttcgtcttcctcgtgctgctcccactcgtttcttcccagtgtgtcaacctgacaactaggactcagctgccaccagcctacaccaactccttcaccagaggcgtgtattacccagacaaggtgtttagaagcagcgtgctgcactctacccaggacctctttctgccctttttcagcaacgtgacatggtttcacgcaattcacgtgtccggcactaatggcacaaagcggttcgacaatccagtcctgcctttcaacgatggcgtctactttgcatctactgagaaatccaatatcattaggggatggatcttcggcacaaccctggattctaagacccagagcctgctgatcgtcaacaacgccacaaacgtggtcattaaggtttgcgagtttcagttctgtaacgatccttttctgggcgtgtattatcataagaacaataagagctggatggagtccgagtttagagtgtatagctctgcaaataattgtacctttgagtacgtgagccagccctttctgatggacctggagggaaaacaaggaaacttcaaaaacctgcgggaattcgttttcaaaaacatcgacggctatttcaagatctatagcaagcataccccaatcaacctcgtgagggacctcccccagggctttagcgcactggagccactggttgacctgcctatcggcattaatatcacaagatttcagaccctgctggcactgcatagaagctatctgacccctggagactcctctagtgggtggactgccggcgccgctgcctactatgtgggctatctgcagccacggacattcctgctgaaatacaatgagaacgggacaatcacagatgctgttgattgcgcactcgaccccctgtccgagacaaagtgcactctcaagagctttaccgtcgagaagggcatctatcagacctcaaacttcagggtgcagcccacagaatctatcgtgcgcttccctaatatcactaacctgtgtcctttcggtgaagtgttcaacgccaccaggtttgctagcgtgtatgcctggaacaggaagaggatctctaactgcgtcgccgactattccgtgctgtataacagcgcctccttctccacattcaaatgctatggagtgagcccgacaaaactgaacgatctctgctttacaaatgtctacgccgactcttttgtgatcagaggggacgaggtccggcagatcgcaccaggacagacaggcaagattgctgactacaactataagctgcctgacgacttcacaggatgtgtgatcgcatggaactcaaacaatctggactccaaagtcgggggcaactataattacctgtatcgcctgttccggaagtccaacctgaagcccttcgagagggacatcagtacagagatctatcaggctggctccaccccttgcaatggcgtcgaaggctttaattgttattttcccctgcagtcttacgggtttcagcctactaatggagttgggtaccagccatacagagtggtcgtgctcagcttcgagctcctgcatgctccagctacagtttgcgggccaaagaagtccactaacctggtgaagaataagtgcgtcaacttcaactttaacgggctcaccggcaccggcgtgctgactgagagcaacaagaagtttctgccatttcaacagtttggacgggacattgccgacaccaccgatgccgttcgggatccacagaccctggaaattctggacattacaccgtgcagcttcgggggcgtgagcgtgatcacacccggaaccaatacaagcaaccaggttgccgtcctgtatcaggatgtcaattgcacagaagtgccagttgctatccacgcagaccagctgactcccacatggcgggtgtatagcaccggatccaacgtgtttcagacccgcgccggatgtctcattggggccgagcacgtgaataacagctacgagtgcgacatccccattggcgccggcatttgtgcgtcttaccagactcagaccaactctcctagaagggccaggtccgttgctagtcagtctattattgcctataccatgagcctcggagctgagaatagcgtggcctactccaataattccatcgcaatccctactaacttcactatttctgtgaccaccgagatcctgcctgtgtctatgactaagactagcgttgattgtaccatgtatatttgtggcgactctaccgaatgttctaacctgctgcttcagtacggctcattttgcacacagctgaacagagccctgactgggatcgctgtggagcaggacaagaacacacaggaggtgtttgcacaggtgaagcagatctataagacccctcctattaaggatttcggcggattcaatttctcacagattctgccagaccccagtaagccttccaagaggagcttcatcgaggatctcctgtttaacaaggtgaccctggcagacgccggctttattaagcaatatggggattgcctgggcgacattgctgccagagacctgatttgcgcccagaaattcaatggcctcacagtgctgccacctctgctgaccgacgagatgatcgctcaatacactagcgcactgctggccggaaccatcacatcaggctggaccttcggggccggagcagcactgcagattccattcgccatgcagatggcctatagattcaacggcattggcgtcacacagaacgtgctgtacgaaaaccagaagctcatcgctaaccagtttaattccgcaattggaaagatccaagattcactcagctcaaccgcctctgcactcggaaagctgcaggacgtggtcaaccagaatgctcaggccctgaacacactcgtcaagcagctgtcctctaactttggcgctatcagctccgttctgaacgacattctgagccgcctggataaggtggaggctgaagtccagattgaccgcctgattaccggccggctgcagtctctgcaaacatacgtgacccagcagctgatcagagcagccgagatccgggcatccgcaaatctggcagcaactaagatgagcgaatgcgtgctgggccagtccaagcgggtggacttttgtggcaagggctaccacctgatgagcttcccccagagcgccccacatggcgttgtttttctgcacgtgacctatgtccctgctcaggaaaagaactttacaactgctcctgctatctgccatgacggcaaggcccacttcccacgggagggagtgtttgtgtccaatggcacacactggttcgtgacccagaggaacttctatgaaccccagatcatcaccactgacaataccttcgtgtctggaaattgcgacgtcgtgatcggcatcgttaacaacaccgtgtacgaccctctccagccagagctggactcctttaaggaggaactggataagtattttaagaaccacacaagcccagatgtggatctcggggacatctccggaattaacgcctccgtggtgaatatccagaaggagattgaccgcctaaatgaagttgccaagaacctcaatgagtctctgattgatctgcaggaactgggcaagtatgagcagtatatcaaatggccctggtacatttggctggggtttatcgccggactgattgccatcgtcatggtgaccatcatgctgtgttgcatgacctcctgttgttcctgtctgaagggctgctgtagttgcggctcttgctgtaaattcgacgaagatgatagcgagcccgtgctgaagggcgtgaagctgcattatacctga

SEQ ID NO: 30 - DNA, 3627 bp, Artificial Sequence
  Synthetic
atgttcgtcttcctcgtgctgctcccactcgtttcttcccagtgtgtcaacctgacaactaggactcagctgccaccagcctacaccaactccttcaccagaggcgtgtattacccagacaaggtgtttagaagcagcgtgctgcactctacccaggacctctttctgccctttttcagcaacgtgacatggtttcacgcaattcacgtgtccggcactaatggcacaaagcggttcgacaatccagtcctgcctttcaacgatggcgtctactttgcatctactgagaaatccaatatcattaggggatggatcttcggcacaaccctggattctaagacccagagcctgctgatcgtcaacaacgccacaaacgtggtcattaaggtttgcgagtttcagttctgtaacgatccttttctgggcgtgtattatcataagaacaataagagctggatggagtccgagtttagagtgtatagctctgcaaataattgtacctttgagtacgtgagccagccctttctgatggacctggagggaaaacaaggaaacttcaaaaacctgcgggaattcgttttcaaaaacatcgacggctatttcaagatctatagcaagcataccccaatcaacctcgtgagggacctcccccagggctttagcgcactggagccactggttgacctgcctatcggcattaatatcacaagatttcagaccctgctggcactgcatagaagctatctgacccctggagactcctctagtgggtggactgccggcgccgctgcctactatgtgggctatctgcagccacggacattcctgctgaaatacaatgagaacgggacaatcacagatgctgttgattgcgcactcgaccccctgtccgagacaaagtgcactctcaagagctttaccgtcgagaagggcatctatcagacctcaaacttcagggtgcagcccacagaatctatcgtgcgcttccctaatatcactaacctgtgtcctttcggtgaagtgttcaacgccaccaggtttgctagcgtgtatgcctggaacaggaagaggatctctaactgcgtcgccgactattccgtgctgtataacagcgcctccttctccacattcaaatgctatggagtgagcccgacaaaactgaacgatctctgctttacaaatgtctacgccgactcttttgtgatcagaggggacgaggtccggcagatcgcaccaggacagacaggcaagattgctgactacaactataagctgcctgacgacttcacaggatgtgtgatcgcatggaactcaaacaatctggactccaaagtcgggggcaactataattacctgtatcgcctgttccggaagtccaacctgaagcccttcgagagggacatcagtacagagatctatcaggctggctccaccccttgcaatggcgtcgaaggctttaattgttattttcccctgcagtcttacgggtttcagcctactaatggagttgggtaccagccatacagagtggtcgtgctcagcttcgagctcctgcatgctccagctacagtttgcgggccaaagaagtccactaacctggtgaagaataagtgcgtcaacttcaactttaacgggctcaccggcaccggcgtgctgactgagagcaacaagaagtttctgccatttcaacagtttggacgggacattgccgacaccaccgatgccgttcgggatccacagaccctggaaattctggacattacaccgtgcagcttcgggggcgtgagcgtgatcacacccggaaccaatacaagcaaccaggttgccgtcctgtatcaggatgtcaattgcacagaagtgccagttgctatccacgcagaccagctgactcccacatggcgggtgtatagcaccggatccaacgtgtttcagacccgcgccggatgtctcattggggccgagcacgtgaataacagctacgagtgcgacatccccattggcgccggcatttgtgcgtcttaccagactcagaccaactctcctagaagggccaggtccgttgctagtcagtctattattgcctataccatgagcctcggagctgagaatagcgtggcctactccaataattccatcgcaatccctactaacttcactatttctgtgaccaccgagatcctgcctgtgtctatgactaagactagcgttgattgtaccatgtatatttgtggcgactctaccgaatgttctaacctgctgcttcagtacggctcattttgcacacagctgaacagagccctgactgggatcgctgtggagcaggacaagaacacacaggaggtgtttgcacaggtgaagcagatctataagacccctcctattaaggatttcggcggattcaatttctcacagattctgccagaccccagtaagccttccaagaggagcttcatcgaggatctcctgtttaacaaggtgaccctggcagacgccggctttattaagcaatatggggattgcctgggcgacattgctgccagagacctgatttgcgcccagaaattcaatggcctcacagtgctgccacctctgctgaccgacgagatgatcgctcaatacactagcgcactgctggccggaaccatcacatcaggctggaccttcggggccggagcagcactgcagattccattcgccatgcagatggcctatagattcaacggcattggcgtcacacagaacgtgctgtacgaaaaccagaagctcatcgctaaccagtttaattccgcaattggaaagatccaagattcactcagctcaaccgcctctgcactcggaaagctgcaggacgtggtcaaccagaatgctcaggccctgaacacactcgtcaagcagctgtcctctaactttggcgctatcagctccgttctgaacgacattctgagccgcctggataaggtggaggctgaagtccagattgaccgcctgattaccggccggctgcagtctctgcaaacatacgtgacccagcagctgatcagagcagccgagatccgggcatccgcaaatctggcagcaactaagatgagcgaatgcgtgctgggccagtccaagcgggtggacttttgtggcaagggctaccacctgatgagcttcccccagagcgccccacatggcgttgtttttctgcacgtgacctatgtccctgctcaggaaaagaactttacaactgctcctgctatctgccatgacggcaaggcccacttcccacgggagggagtgtttgtgtccaatggcacacactggttcgtgacccagaggaacttctatgaaccccagatcatcaccactgacaataccttcgtgtctggaaattgcgacgtcgtgatcggcatcgttaacaacaccgtgtacgaccctctccagccagagctggactcctttaaggaggaactggataagtattttaagaaccacacaagcccagatgtggatctcggggacatctccggaattaacgcctccgtggtgaatatccagaaggagattgaccgcctaaatgaagttgccaagaacctcaatgagtctctgattgatctgcaggaactgggcaagtatgagcagtga

SEQ ID NO: 31 - DNA, 2046 bp, Artificial Sequence
  Synthetic
atgttcgtcttcctcgtgctgctcccactcgtttcttcccagtgtgtcaacctgacaactaggactcagctgccaccagcctacaccaactccttcaccagaggcgtgtattacccagacaaggtgtttagaagcagcgtgctgcactctacccaggacctctttctgccctttttcagcaacgtgacatggtttcacgcaattcacgtgtccggcactaatggcacaaagcggttcgacaatccagtcctgcctttcaacgatggcgtctactttgcatctactgagaaatccaatatcattaggggatggatcttcggcacaaccctggattctaagacccagagcctgctgatcgtcaacaacgccacaaacgtggtcattaaggtttgcgagtttcagttctgtaacgatccttttctgggcgtgtattatcataagaacaataagagctggatggagtccgagtttagagtgtatagctctgcaaataattgtacctttgagtacgtgagccagccctttctgatggacctggagggaaaacaaggaaacttcaaaaacctgcgggaattcgttttcaaaaacatcgacggctatttcaagatctatagcaagcataccccaatcaacctcgtgagggacctcccccagggctttagcgcactggagccactggttgacctgcctatcggcattaatatcacaagatttcagaccctgctggcactgcatagaagctatctgacccctggagactcctctagtgggtggactgccggcgccgctgcctactatgtgggctatctgcagccacggacattcctgctgaaatacaatgagaacgggacaatcacagatgctgttgattgcgcactcgaccccctgtccgagacaaagtgcactctcaagagctttaccgtcgagaagggcatctatcagacctcaaacttcagggtgcagcccacagaatctatcgtgcgcttccctaatatcactaacctgtgtcctttcggtgaagtgttcaacgccaccaggtttgctagcgtgtatgcctggaacaggaagaggatctctaactgcgtcgccgactattccgtgctgtataacagcgcctccttctccacattcaaatgctatggagtgagcccgacaaaactgaacgatctctgctttacaaatgtctacgccgactcttttgtgatcagaggggacgaggtccggcagatcgcaccaggacagacaggcaagattgctgactacaactataagctgcctgacgacttcacaggatgtgtgatcgcatggaactcaaacaatctggactccaaagtcgggggcaactataattacctgtatcgcctgttccggaagtccaacctgaagcccttcgagagggacatcagtacagagatctatcaggctggctccaccccttgcaatggcgtcgaaggctttaattgttattttcccctgcagtcttacgggtttcagcctactaatggagttgggtaccagccatacagagtggtcgtgctcagcttcgagctcctgcatgctccagctacagtttgcgggccaaagaagtccactaacctggtgaagaataagtgcgtcaacttcaactttaacgggctcaccggcaccggcgtgctgactgagagcaacaagaagtttctgccatttcaacagtttggacgggacattgccgacaccaccgatgccgttcgggatccacagaccctggaaattctggacattacaccgtgcagcttcgggggcgtgagcgtgatcacacccggaaccaatacaagcaaccaggttgccgtcctgtatcaggatgtcaattgcacagaagtgccagttgctatccacgcagaccagctgactcccacatggcgggtgtatagcaccggatccaacgtgtttcagacccgcgccggatgtctcattggggccgagcacgtgaataacagctacgagtgcgacatccccattggcgccggcatttgtgcgtcttaccagactcagaccaactctccttga

SEQ ID NO: 32 - DNA, 1770 bp, Artificial Sequence
  Synthetic
atgtccgttgctagtcagtctattattgcctataccatgagcctcggagctgagaatagcgtggcctactccaataattccatcgcaatccctactaacttcactatttctgtgaccaccgagatcctgcctgtgtctatgactaagactagcgttgattgtaccatgtatatttgtggcgactctaccgaatgttctaacctgctgcttcagtacggctcattttgcacacagctgaacagagccctgactgggatcgctgtggagcaggacaagaacacacaggaggtgtttgcacaggtgaagcagatctataagacccctcctattaaggatttcggcggattcaatttctcacagattctgccagaccccagtaagccttccaagaggagcttcatcgaggatctcctgtttaacaaggtgaccctggcagacgccggctttattaagcaatatggggattgcctgggcgacattgctgccagagacctgatttgcgcccagaaattcaatggcctcacagtgctgccacctctgctgaccgacgagatgatcgctcaatacactagcgcactgctggccggaaccatcacatcaggctggaccttcggggccggagcagcactgcagattccattcgccatgcagatggcctatagattcaacggcattggcgtcacacagaacgtgctgtacgaaaaccagaagctcatcgctaaccagtttaattccgcaattggaaagatccaagattcactcagctcaaccgcctctgcactcggaaagctgcaggacgtggtcaaccagaatgctcaggccctgaacacactcgtcaagcagctgtcctctaactttggcgctatcagctccgttctgaacgacattctgagccgcctggataaggtggaggctgaagtccagattgaccgcctgattaccggccggctgcagtctctgcaaacatacgtgacccagcagctgatcagagcagccgagatccgggcatccgcaaatctggcagcaactaagatgagcgaatgcgtgctgggccagtccaagcgggtggacttttgtggcaagggctaccacctgatgagcttcccccagagcgccccacatggcgttgtttttctgcacgtgacctatgtccctgctcaggaaaagaactttacaactgctcctgctatctgccatgacggcaaggcccacttcccacgggagggagtgtttgtgtccaatggcacacactggttcgtgacccagaggaacttctatgaaccccagatcatcaccactgacaataccttcgtgtctggaaattgcgacgtcgtgatcggcatcgttaacaacaccgtgtacgaccctctccagccagagctggactcctttaaggaggaactggataagtattttaagaaccacacaagcccagatgtggatctcggggacatctccggaattaacgcctccgtggtgaatatccagaaggagattgaccgcctaaatgaagttgccaagaacctcaatgagtctctgattgatctgcaggaactgggcaagtatgagcagtatatcaaatggccctggtacatttggctggggtttatcgccggactgattgccatcgtcatggtgaccatcatgctgtgttgcatgacctcctgttgttcctgtctgaagggctgctgtagttgcggctcttgctgtaaattcgacgaagatgatagcgagcccgtgctgaagggcgtgaagctgcattatacctga

SEQ ID NO: 33 - DNA, 1185 bp, Artificial Sequence
  Synthetic
atgagcttcatcgaggatctcctgtttaacaaggtgaccctggcagacgccggctttattaagcaatatggggattgcctgggcgacattgctgccagagacctgatttgcgcccagaaattcaatggcctcacagtgctgccacctctgctgaccgacgagatgatcgctcaatacactagcgcactgctggccggaaccatcacatcaggctggaccttcggggccggagcagcactgcagattccattcgccatgcagatggcctatagattcaacggcattggcgtcacacagaacgtgctgtacgaaaaccagaagctcatcgctaaccagtttaattccgcaattggaaagatccaagattcactcagctcaaccgcctctgcactcggaaagctgcaggacgtggtcaaccagaatgctcaggccctgaacacactcgtcaagcagctgtcctctaactttggcgctatcagctccgttctgaacgacattctgagccgcctggataaggtggaggctgaagtccagattgaccgcctgattaccggccggctgcagtctctgcaaacatacgtgacccagcagctgatcagagcagccgagatccgggcatccgcaaatctggcagcaactaagatgagcgaatgcgtgctgggccagtccaagcgggtggacttttgtggcaagggctaccacctgatgagcttcccccagagcgccccacatggcgttgtttttctgcacgtgacctatgtccctgctcaggaaaagaactttacaactgctcctgctatctgccatgacggcaaggcccacttcccacgggagggagtgtttgtgtccaatggcacacactggttcgtgacccagaggaacttctatgaaccccagatcatcaccactgacaataccttcgtgtctggaaattgcgacgtcgtgatcggcatcgttaacaacaccgtgtacgaccctctccagccagagctggactcctttaaggaggaactggataagtattttaagaaccacacaagcccagatgtggatctcggggacatctccggaattaacgcctccgtggtgaatatccagaaggagattgaccgcctaaatgaagttgccaagaacctcaatgagtctctgattgatctgcaggaactgggcaagtatgagcagtaa

SEQ ID NO: 34 - DNA, 582 bp, Artificial Sequence
  Synthetic
atgcctaatatcactaacctgtgtcctttcggtgaagtgttcaacgccaccaggtttgctagcgtgtatgcctggaacaggaagaggatctctaactgcgtcgccgactattccgtgctgtataacagcgcctccttctccacattcaaatgctatggagtgagcccgacaaaactgaacgatctctgctttacaaatgtctacgccgactcttttgtgatcagaggggacgaggtccggcagatcgcaccaggacagacaggcaagattgctgactacaactataagctgcctgacgacttcacaggatgtgtgatcgcatggaactcaaacaatctggactccaaagtcgggggcaactataattacctgtatcgcctgttccggaagtccaacctgaagcccttcgagagggacatcagtacagagatctatcaggctggctccaccccttgcaatggcgtcgaaggctttaattgttattttcccctgcagtcttacgggtttcagcctactaatggagttgggtaccagccatacagagtggtcgtgctcagcttcgagctcctgcatgctccataa

SEQ ID NO: 35 - DNA, 624 bp, Artificial Sequence
  Synthetic
atgttcgtcttcctcgtgctgctcccactcgtttcttcccagtgtcctaatatcactaacctgtgtcctttcggtgaagtgttcaacgccaccaggtttgctagcgtgtatgcctggaacaggaagaggatctctaactgcgtcgccgactattccgtgctgtataacagcgcctccttctccacattcaaatgctatggagtgagcccgacaaaactgaacgatctctgctttacaaatgtctacgccgactcttttgtgatcagaggggacgaggtccggcagatcgcaccaggacagacaggcaagattgctgactacaactataagctgcctgacgacttcacaggatgtgtgatcgcatggaactcaaacaatctggactccaaagtcgggggcaactataattacctgtatcgcctgttccggaagtccaacctgaagcccttcgagagggacatcagtacagagatctatcaggctggctccaccccttgcaatggcgtcgaaggctttaattgttattttcccctgcagtcttacgggtttcagcctactaatggagttgggtaccagccatacagagtggtcgtgctcagcttcgagctcctgcatgctccataa

SEQ ID NO: 36 - DNA, 1317 bp, Artificial Sequence
  Synthetic
atgttcgtcttcctcgtgctgctcccactcgtttcttcccagtgtcctaatatcactaacctgtgtcctttcggtgaagtgttcaacgccaccaggtttgctagcgtgtatgcctggaacaggaagaggatctctaactgcgtcgccgactattccgtgctgtataacagcgcctccttctccacattcaaatgctatggagtgagcccgacaaaactgaacgatctctgctttacaaatgtctacgccgactcttttgtgatcagaggggacgaggtccggcagatcgcaccaggacagacaggcaagattgctgactacaactataagctgcctgacgacttcacaggatgtgtgatcgcatggaactcaaacaatctggactccaaagtcgggggcaactataattacctgtatcgcctgttccggaagtccaacctgaagcccttcgagagggacatcagtacagagatctatcaggctggctccaccccttgcaatggcgtcgaaggctttaattgttattttcccctgcagtcttacgggtttcagcctactaatggagttgggtaccagccatacagagtggtcgtgctcagcttcgagctcctgcatgctccacctaagtcctgcgacaaaacccatacatgtccaccatgcccagctcctgaactgctcggcgggcctagtgttttcctcttccctcctaagcccaaggataccctcatgatctctcgcacaccagaagtgacctgcgtggtcgtggatgtctctcacgaggatcctgaagtgaagtttaactggtatgtcgacggagtggaagtgcacaacgccaagacaaagccaagagaagaacaatacaattctacttatagggtggtgtctgtgctgacagtgctgcaccaggattggctgaatggaaaagaatataagtgtaaggtctctaacaaggccctgcccgctccaattgagaagacaatttccaaggccaaggggcagcctcgggaacctcaggtgtacacactgcccccatccagggatgaactgactaaaaatcaggtgtctctgacatgcctggtgaaagggttttatccaagtgacattgctgtggagtgggagtctaatgggcagcctgaaaataactacaagaccacaccaccagtgctcgatagcgacgggtctttctttctgtattctaaactgaccgtggataaatctcggtggcagcagggaaacgtgttttcttgctcagtgatgcacgaagctctgcacaatcactatacacagaaatccctgtccctgtctccaggcaaataa

SEQ ID NO: 37 - DNA, 45 bp, Artificial Sequence
  Synthetic
atgttcgtcttcctcgtgctgctcccactcgtttcttcccagtgt

SEQ ID NO: 38 - protein, 33 aa, Artificial Sequence
  Synthetic
MATGSRTSLLLAFGLLCLPWLQEGSAFPTIPLS

SEQ ID NO: 39 - RNA, 99 nt, Artificial Sequence
  Synthetic
auggccacuggaucaagaaccucacugcugcucgcuuuuggacugcuuugccugcccugguugcaagaaggaucggcuuucccgaccaucccacucucc

SEQ ID NO: 40 - protein, 33 aa, Artificial Sequence; identical to SEQ ID NO: 38
  Synthetic

SEQ ID NO: 41 - RNA, 99 nt, Artificial Sequence
  Synthetic
auggcaacuggaucaagaaccucccuccugcucgcauucggccugcucugucucccauggcuccaagaaggaagcgcguuccccacuaucccccucucg

SEQ ID NO: 42 - DNA, 3822 bp, Artificial Sequence
  Synthetic
atgttcgtcttcctcgtgctgctcccactcgtttcttcccagtgtgtcaacctgacaactaggactcagctgccaccagcctacaccaactccttcaccagaggcgtgtattacccagacaaggtgtttagaagcagcgtgctgcactctacccaggacctctttctgccctttttcagcaacgtgacatggtttcacgcaattcacgtgtccggcactaatggcacaaagcggttcgacaatccagtcctgcctttcaacgatggcgtctactttgcatctactgagaaatccaatatcattaggggatggatcttcggcacaaccctggattctaagacccagagcctgctgatcgtcaacaacgccacaaacgtggtcattaaggtttgcgagtttcagttctgtaacgatccttttctgggcgtgtattatcataagaacaataagagctggatggagtccgagtttagagtgtatagctctgcaaataattgtacctttgagtacgtgagccagccctttctgatggacctggagggaaaacaaggaaacttcaaaaacctgcgggaattcgttttcaaaaacatcgacggctatttcaagatctatagcaagcataccccaatcaacctcgtgagggacctcccccagggctttagcgcactggagccactggttgacctgcctatcggcattaatatcacaagatttcagaccctgctggcactgcatagaagctatctgacccctggagactcctctagtgggtggactgccggcgccgctgcctactatgtgggctatctgcagccacggacattcctgctgaaatacaatgagaacgggacaatcacagatgctgttgattgcgcactcgaccccctgtccgagacaaagtgcactctcaagagctttaccgtcgagaagggcatctatcagacctcaaacttcagggtgcagcccacagaatctatcgtgcgcttccctaatatcactaacctgtgtcctttcggtgaagtgttcaacgccaccaggtttgctagcgtgtatgcctggaacaggaagaggatctctaactgcgtcgccgactattccgtgctgtataacagcgcctccttctccacattcaaatgctatggagtgagcccgacaaaactgaacgatctctgctttacaaatgtctacgccgactcttttgtgatcagaggggacgaggtccggcagatcgcaccaggacagacaggcaagattgctgactacaactataagctgcctgacgacttcacaggatgtgtgatcgcatggaactcaaacaatctggactccaaagtcgggggcaactataattacctgtatcgcctgttccggaagtccaacctgaagcccttcgagagggacatcagtacagagatctatcaggctggctccaccccttgcaatggcgtcgaaggctttaattgttattttcccctgcagtcttacgggtttcagcctactaatggagttgggtaccagccatacagagtggtcgtgctcagcttcgagctcctgcatgctccagctacagtttgcgggccaaagaagtccactaacctggtgaagaataagtgcgtcaacttcaactttaacgggctcaccggcaccggcgtgctgactgagagcaacaagaagtttctgccatttcaacagtttggacgggacattgccgacaccaccgatgccgttcgggatccacagaccctggaaattctggacattacaccgtgcagcttcgggggcgtgagcgtgatcacacccggaaccaatacaagcaaccaggttgccgtcctgtatcaggatgtcaattgcacagaagtgccagttgctatccacgcagaccagctgactcccacatggcgggtgtatagcaccggatccaacgtgtttcagacccgcgccggatgtctcattggggccgagcacgtgaataacagctacgagtgcgacatccccattggcgccggcatttgtgcgtcttaccagactcagaccaactctcctggctccgcctcttccgttgctagtcagtctattattgcctataccatgagcctcggagctgagaatagcgtggcctactccaataattccatcgcaatccctactaacttcactatttctgtgaccaccgagatcctgcctgtgtctatgactaagactagcgttgattgtaccatgtatatttgtggcgactctaccgaatgttctaacctgctgcttcagtacggctcattttgcacacagctgaacagagccctgactgggatcgctgtggagcaggacaagaacacacaggaggtgtttgcacaggtgaagcagatctataagacccctcctattaaggatttcggcggattcaatttctcacagattctgccagaccccagtaagccttccaagaggagcttcatcgaggatctcctgtttaacaaggtgaccctggcagacgccggctttattaagcaatatggggattgcctgggcgacattgctgccagagacctgatttgcgcccagaaattcaatggcctcacagtgctgccacctctgctgaccgacgagatgatcgctcaatacactagcgcactgctggccggaaccatcacatcaggctggaccttcggggccggagcagcactgcagattccattcgccatgcagatggcctatagattcaacggcattggcgtcacacagaacgtgctgtacgaaaaccagaagctcatcgctaaccagtttaattccgcaattggaaagatccaagattcactcagctcaaccgcctctgcactcggaaagctgcaggacgtggtcaaccagaatgctcaggccctgaacacactcgtcaagcagctgtcctctaactttggcgctatcagctccgttctgaacgacattctgagccgcctggataaggtggaggctgaagtccagattgaccgcctgattaccggccggctgcagtctctgcaaacatacgtgacccagcagctgatcagagcagccgagatccgggcatccgcaaatctggcagcaactaagatgagcgaatgcgtgctgggccagtccaagcgggtggacttttgtggcaagggctaccacctgatgagcttcccccagagcgccccacatggcgttgtttttctgcacgtgacctatgtccctgctcaggaaaagaactttacaactgctcctgctatctgccatgacggcaaggcccacttcccacgggagggagtgtttgtgtccaatggcacacactggttcgtgacccagaggaacttctatgaaccccagatcatcaccactgacaataccttcgtgtctggaaattgcgacgtcgtgatcggcatcgttaacaacaccgtgtacgaccctctccagccagagctggactcctttaaggaggaactggataagtattttaagaaccacacaagcccagatgtggatctcggggacatctccggaattaacgcctccgtggtgaatatccagaaggagattgaccgcctaaatgaagttgccaagaacctcaatgagtctctgattgatctgcaggaactgggcaagtatgagcagtatatcaaatggccctggtacatttggctggggtttatcgccggactgattgccatcgtcatggtgaccatcatgctgtgttgcatgacctcctgttgttcctgtctgaagggctgctgtagttgcggctcttgctgtaaattcgacgaagatgatagcgagcccgtgctgaagggcgtgaagctgcattatacctga

SEQ ID NO: 43 - DNA, 3822 bp, Artificial Sequence
  Synthetic
atgttcgtcttcctcgtgctgctcccactcgtttcttcccagtgtgtcaacctgacaactaggactcagctgccaccagcctacaccaactccttcaccagaggcgtgtattacccagacaaggtgtttagaagcagcgtgctgcactctacccaggacctctttctgccctttttcagcaacgtgacatggtttcacgcaattcacgtgtccggcactaatggcacaaagcggttcgacaatccagtcctgcctttcaacgatggcgtctactttgcatctactgagaaatccaatatcattaggggatggatcttcggcacaaccctggattctaagacccagagcctgctgatcgtcaacaacgccacaaacgtggtcattaaggtttgcgagtttcagttctgtaacgatccttttctgggcgtgtattatcataagaacaataagagctggatggagtccgagtttagagtgtatagctctgcaaataattgtacctttgagtacgtgagccagccctttctgatggacctggagggaaaacaaggaaacttcaaaaacctgcgggaattcgttttcaaaaacatcgacggctatttcaagatctatagcaagcataccccaatcaacctcgtgagggacctcccccagggctttagcgcactggagccactggttgacctgcctatcggcattaatatcacaagatttcagaccctgctggcactgcatagaagctatctgacccctggagactcctctagtgggtggactgccggcgccgctgcctactatgtgggctatctgcagccacggacattcctgctgaaatacaatgagaacgggacaatcacagatgctgttgattgcgcactcgaccccctgtccgagacaaagtgcactctcaagagctttaccgtcgagaagggcatctatcagacctcaaacttcagggtgcagcccacagaatctatcgtgcgcttccctaatatcactaacctgtgtcctttcggtgaagtgttcaacgccaccaggtttgctagcgtgtatgcctggaacaggaagaggatctctaactgcgtcgccgactattccgtgctgtataacagcgcctccttctccacattcaaatgctatggagtgagcccgacaaaactgaacgatctctgctttacaaatgtctacgccgactcttttgtgatcagaggggacgaggtccggcagatcgcaccaggacagacaggcaagattgctgactacaactataagctgcctgacgacttcacaggatgtgtgatcgcatggaactcaaacaatctggactccaaagtcgggggcaactataattacctgtatcgcctgttccggaagtccaacctgaagcccttcgagagggacatcagtacagagatctatcaggctggctccaccccttgcaatggcgtcgaaggctttaattgttattttcccctgcagtcttacgggtttcagcctactaatggagttgggtaccagccatacagagtggtcgtgctcagcttcgagctcctgcatgctccagctacagtttgcgggccaaagaagtccactaacctggtgaagaataagtgcgtcaacttcaactttaacgggctcaccggcaccggcgtgctgactgagagcaacaagaagtttctgccatttcaacagtttggacgggacattgccgacaccaccgatgccgttcgggatccacagaccctggaaattctggacattacaccgtgcagcttcgggggcgtgagcgtgatcacacccggaaccaatacaagcaaccaggttgccgtcctgtatcaggatgtcaattgcacagaagtgccagttgctatccacgcagaccagctgactcccacatggcgggtgtatagcaccggatccaacgtgtttcagacccgcgccggatgtctcattggggccgagcacgtgaataacagctacgagtgcgacatccccattggcgccggcatttgtgcgtcttaccagactcagaccaactctcctagaagggccaggtccgttgctagtcagtctattattgcctataccatgagcctcggagctgagaatagcgtggcctactccaataattccatcgcaatccctactaacttcactatttctgtgaccaccgagatcctgcctgtgtctatgactaagactagcgttgattgtaccatgtatatttgtggcgactctaccgaatgttctaacctgctgcttcagtacggctcattttgcacacagctgaacagagccctgactgggatcgctgtggagcaggacaagaacacacaggaggtgtttgcacaggtgaagcagatctataagacccctcctattaaggatttcggcggattcaatttctcacagattctgccagaccccagtaagccttccaagaggagcttcatcgaggatctcctgtttaacaaggtgaccctggcagacgccggctttattaagcaatatggggattgcctgggcgacattgctgccagagacctgatttgcgcccagaaattcaatggcctcacagtgctgccacctctgctgaccgacgagatgatcgctcaatacactagcgcactgctggccggaaccatcacatcaggctggaccttcggggccggagcagcactgcagattccattcgccatgcagatggcctatagattcaacggcattggcgtcacacagaacgtgctgtacgaaaaccagaagctcatcgctaaccagtttaattccgcaattggaaagatccaagattcactcagctcaaccgcctctgcactcggaaagctgcaggacgtggtcaaccagaatgctcaggccctgaacacactcgtcaagcagctgtcctctaactttggcgctatcagctccgttctgaacgacattctgagccgcctggatcccccagaggctgaagtccagattgaccgcctgattaccggccggctgcagtctctgcaaacatacgtgacccagcagctgatcagagcagccgagatccgggcatccgcaaatctggcagcaactaagatgagcgaatgcgtgctgggccagtccaagcgggtggacttttgtggcaagggctaccacctgatgagcttcccccagagcgccccacatggcgttgtttttctgcacgtgacctatgtccctgctcaggaaaagaactttacaactgctcctgctatctgccatgacggcaaggcccacttcccacgggagggagtgtttgtgtccaatggcacacactggttcgtgacccagaggaacttctatgaaccccagatcatcaccactgacaataccttcgtgtctggaaattgcgacgtcgtgatcggcatcgttaacaacaccgtgtacgaccctctccagccagagctggactcctttaaggaggaactggataagtattttaagaaccacacaagcccagatgtggatctcggggacatctccggaattaacgcctccgtggtgaatatccagaaggagattgaccgcctaaatgaagttgccaagaacctcaatgagtctctgattgatctgcaggaactgggcaagtatgagcagtatatcaaatggccctggtacatttggctggggtttatcgccggactgattgccatcgtcatggtgaccatcatgctgtgttgcatgacctcctgttgttcctgtctgaagggctgctgtagttgcggctcttgctgtaaattcgacgaagatgatagcgagcccgtgctgaagggcgtgaagctgcattatacctga

SEQ ID NO: 44 - DNA, 3822 bp, Artificial Sequence
  Synthetic
atgttcgtcttcctcgtgctgctcccactcgtttcttcccagtgtgtcaacctgacaactaggactcagctgccaccagcctacaccaactccttcaccagaggcgtgtattacccagacaaggtgtttagaagcagcgtgctgcactctacccaggacctctttctgccctttttcagcaacgtgacatggtttcacgcaattcacgtgtccggcactaatggcacaaagcggttcgacaatccagtcctgcctttcaacgatggcgtctactttgcatctactgagaaatccaatatcattaggggatggatcttcggcacaaccctggattctaagacccagagcctgctgatcgtcaacaacgccacaaacgtggtcattaaggtttgcgagtttcagttctgtaacgatccttttctgggcgtgtattatcataagaacaataagagctggatggagtccgagtttagagtgtatagctctgcaaataattgtacctttgagtacgtgagccagccctttctgatggacctggagggaaaacaaggaaacttcaaaaacctgcgggaattcgttttcaaaaacatcgacggctatttcaagatctatagcaagcataccccaatcaacctcgtgagggacctcccccagggctttagcgcactggagccactggttgacctgcctatcggcattaatatcacaagatttcagaccctgctggcactgcatagaagctatctgacccctggagactcctctagtgggtggactgccggcgccgctgcctactatgtgggctatctgcagccacggacattcctgctgaaatacaatgagaacgggacaatcacagatgctgttgattgcgcactcgaccccctgtccgagacaaagtgcactctcaagagctttaccgtcgagaagggcatctatcagacctcaaacttcagggtgcagcccacagaatctatcgtgcgcttccctaatatcactaacctgtgtcctttcggtgaagtgttcaacgccaccaggtttgctagcgtgtatgcctggaacaggaagaggatctctaactgcgtcgccgactattccgtgctgtataacagcgcctccttctccacattcaaatgctatggagtgagcccgacaaaactgaacgatctctgctttacaaatgtctacgccgactcttttgtgatcagaggggacgaggtccggcagatcgcaccaggacagacaggcaagattgctgactacaactataagctgcctgacgacttcacaggatgtgtgatcgcatggaactcaaacaatctggactccaaagtcgggggcaactataattacctgtatcgcctgttccggaagtccaacctgaagcccttcgagagggacatcagtacagagatctatcaggctggctccaccccttgcaatggcgtcgaaggctttaattgttattttcccctgcagtcttacgggtttcagcctactaatggagttgggtaccagccatacagagtggtcgtgctcagcttcgagctcctgcatgctccagctacagtttgcgggccaaagaagtccactaacctggtgaagaataagtgcgtcaacttcaactttaacgggctcaccggcaccggcgtgctgactgagagcaacaagaagtttctgccatttcaacagtttggacgggacattgccgacaccaccgatgccgttcgggatccacagaccctggaaattctggacattacaccgtgcagcttcgggggcgtgagcgtgatcacacccggaaccaatacaagcaaccaggttgccgtcctgtatcaggatgtcaattgcacagaagtgccagttgctatccacgcagaccagctgactcccacatggcgggtgtatagcaccggatccaacgtgtttcagacccgcgccggatgtctcattggggccgagcacgtgaataacagctacgagtgcgacatccccattggcgccggcatttgtgcgtcttaccagactcagaccaactctcctggctccgcctcttccgttgctagtcagtctattattgcctataccatgagcctcggagctgagaatagcgtggcctactccaataattccatcgcaatccctactaacttcactatttctgtgaccaccgagatcctgcctgtgtctatgactaagactagcgttgattgtaccatgtatatttgtggcgactctaccgaatgttctaacctgctgcttcagtacggctcattttgcacacagctgaacagagccctgactgggatcgctgtggagcaggacaagaacacacaggaggtgtttgcacaggtgaagcagatctataagacccctcctattaaggatttcggcggattcaatttctcacagattctgccagaccccagtaagccttccaagaggagcttcatcgaggatctcctgtttaacaaggtgaccctggcagacgccggctttattaagcaatatggggattgcctgggcgacattgctgccagagacctgatttgcgcccagaaattcaatggcctcacagtgctgccacctctgctgaccgacgagatgatcgctcaatacactagcgcactgctggccggaaccatcacatcaggctggaccttcggggccggagcagcactgcagattccattcgccatgcagatggcctatagattcaacggcattggcgtcacacagaacgtgctgtacgaaaaccagaagctcatcgctaaccagtttaattccgcaattggaaagatccaagattcactcagctcaaccgcctctgcactcggaaagctgcaggacgtggtcaaccagaatgctcaggccctgaacacactcgtcaagcagctgtcctctaactttggcgctatcagctccgttctgaacgacattctgagccgcctggatcccccagaggctgaagtccagattgaccgcctgattaccggccggctgcagtctctgcaaacatacgtgacccagcagctgatcagagcagccgagatccgggcatccgcaaatctggcagcaactaagatgagcgaatgcgtgctgggccagtccaagcgggtggacttttgtggcaagggctaccacctgatgagcttcccccagagcgccccacatggcgttgtttttctgcacgtgacctatgtccctgctcaggaaaagaactttacaactgctcctgctatctgccatgacggcaaggcccacttcccacgggagggagtgtttgtgtccaatggcacacactggttcgtgacccagaggaacttctatgaaccccagatcatcaccactgacaataccttcgtgtctggaaattgcgacgtcgtgatcggcatcgttaacaacaccgtgtacgaccctctccagccagagctggactcctttaaggaggaactggataagtattttaagaaccacacaagcccagatgtggatctcggggacatctccggaattaacgcctccgtggtgaatatccagaaggagattgaccgcctaaatgaagttgccaagaacctcaatgagtctctgattgatctgcaggaactgggcaagtatgagcagtatatcaaatggccctggtacatttggctggggtttatcgccggactgattgccatcgtcatggtgaccatcatgctgtgttgcatgacctcctgttgttcctgtctgaagggctgctgtagttgcggctcttgctgtaaattcgacgaagatgatagcgagcccgtgctgaagggcgtgaagctgcattatacctga

SEQ ID NO: 45 - DNA, 3627 bp, Artificial Sequence
  Synthetic
atgttcgtcttcctcgtgctgctcccactcgtttcttcccagtgtgtcaacctgacaactaggactcagctgccaccagcctacaccaactccttcaccagaggcgtgtattacccagacaaggtgtttagaagcagcgtgctgcactctacccaggacctctttctgccctttttcagcaacgtgacatggtttcacgcaattcacgtgtccggcactaatggcacaaagcggttcgacaatccagtcctgcctttcaacgatggcgtctactttgcatctactgagaaatccaatatcattaggggatggatcttcggcacaaccctggattctaagacccagagcctgctgatcgtcaacaacgccacaaacgtggtcattaaggtttgcgagtttcagttctgtaacgatccttttctgggcgtgtattatcataagaacaataagagctggatggagtccgagtttagagtgtatagctctgcaaataattgtacctttgagtacgtgagccagccctttctgatggacctggagggaaaacaaggaaacttcaaaaacctgcgggaattcgttttcaaaaacatcgacggctatttcaagatctatagcaagcataccccaatcaacctcgtgagggacctcccccagggctttagcgcactggagccactggttgacctgcctatcggcattaatatcacaagatttcagaccctgctggcactgcatagaagctatctgacccctggagactcctctagtgggtggactgccggcgccgctgcctactatgtgggctatctgcagccacggacattcctgctgaaatacaatgagaacgggacaatcacagatgctgttgattgcgcactcgaccccctgtccgagacaaagtgcactctcaagagctttaccgtcgagaagggcatctatcagacctcaaacttcagggtgcagcccacagaatctatcgtgcgcttccctaatatcactaacctgtgtcctttcggtgaagtgttcaacgccaccaggtttgctagcgtgtatgcctggaacaggaagaggatctctaactgcgtcgccgactattccgtgctgtataacagcgcctccttctccacattcaaatgctatggagtgagcccgacaaaactgaacgatctctgctttacaaatgtctacgccgactcttttgtgatcagaggggacgaggtccggcagatcgcaccaggacagacaggcaagattgctgactacaactataagctgcctgacgacttcacaggatgtgtgatcgcatggaactcaaacaatctggactccaaagtcgggggcaactataattacctgtatcgcctgttccggaagtccaacctgaagcccttcgagagggacatcagtacagagatctatcaggctggctccaccccttgcaatggcgtcgaaggctttaattgttattttcccctgcagtcttacgggtttcagcctactaatggagttgggtaccagccatacagagtggtcgtgctcagcttcgagctcctgcatgctccagctacagtttgcgggccaaagaagtccactaacctggtgaagaataagtgcgtcaacttcaactttaacgggctcaccggcaccggcgtgctgactgagagcaacaagaagtttctgccatttcaacagtttggacgggacattgccgacaccaccgatgccgttcgggatccacagaccctggaaattctggacattacaccgtgcagcttcgggggcgtgagcgtgatcacacccggaaccaatacaagcaaccaggttgccgtcctgtatcaggatgtcaattgcacagaagtgccagttgctatccacgcagaccagctgactcccacatggcgggtgtatagcaccggatccaacgtgtttcagacccgcgccggatgtctcattggggccgagcacgtgaataacagctacgagtgcgacatccccattggcgccggcatttgtgcgtcttaccagactcagaccaactctcctggctccgcctcttccgttgctagtcagtctattattgcctataccatgagcctcggagctgagaatagcgtggcctactccaataattccatcgcaatccctactaacttcactatttctgtgaccaccgagatcctgcctgtgtctatgactaagactagcgttgattgtaccatgtatatttgtggcgactctaccgaatgttctaacctgctgcttcagtacggctcattttgcacacagctgaacagagccctgactgggatcgctgtggagcaggacaagaacacacaggaggtgtttgcacaggtgaagcagatctataagacccctcctattaaggatttcggcggattcaatttctcacagattctgccagaccccagtaagccttccaagaggagcttcatcgaggatctcctgtttaacaaggtgaccctggcagacgccggctttattaagcaatatggggattgcctgggcgacattgctgccagagacctgatttgcgcccagaaattcaatggcctcacagtgctgccacctctgctgaccgacgagatgatcgctcaatacactagcgcactgctggccggaaccatcacatcaggctggaccttcggggccggagcagcactgcagattccattcgccatgcagatggcctatagattcaacggcattggcgtcacacagaacgtgctgtacgaaaaccagaagctcatcgctaaccagtttaattccgcaattggaaagatccaagattcactcagctcaaccgcctctgcactcggaaagctgcaggacgtggtcaaccagaatgctcaggccctgaacacactcgtcaagcagctgtcctctaactttggcgctatcagctccgttctgaacgacattctgagccgcctggatcccccagaggctgaagtccagattgaccgcctgattaccggccggctgcagtctctgcaaacatacgtgacccagcagctgatcagagcagccgagatccgggcatccgcaaatctggcagcaactaagatgagcgaatgcgtgctgggccagtccaagcgggtggacttttgtggcaagggctaccacctgatgagcttcccccagagcgccccacatggcgttgtttttctgcacgtgacctatgtccctgctcaggaaaagaactttacaactgctcctgctatctgccatgacggcaaggcccacttcccacgggagggagtgtttgtgtccaatggcacacactggttcgtgacccagaggaacttctatgaaccccagatcatcaccactgacaataccttcgtgtctggaaattgcgacgtcgtgatcggcatcgttaacaacaccgtgtacgaccctctccagccagagctggactcctttaaggaggaactggataagtattttaagaaccacacaagcccagatgtggatctcggggacatctccggaattaacgcctccgtggtgaatatccagaaggagattgaccgcctaaatgaagttgccaagaacctcaatgagtctctgattgatctgcaggaactgggcaagtatgagcagtga

SEQ ID NO: 46 - DNA, 3708 bp, Artificial Sequence
  Synthetic
atgttcgtcttcctcgtgctgctcccactcgtttcttcccagtgtgtcaacctgacaactaggactcagctgccaccagcctacaccaactccttcaccagaggcgtgtattacccagacaaggtgtttagaagcagcgtgctgcactctacccaggacctctttctgccctttttcagcaacgtgacatggtttcacgcaattcacgtgtccggcactaatggcacaaagcggttcgacaatccagtcctgcctttcaacgatggcgtctactttgcatctactgagaaatccaatatcattaggggatggatcttcggcacaaccctggattctaagacccagagcctgctgatcgtcaacaacgccacaaacgtggtcattaaggtttgcgagtttcagttctgtaacgatccttttctgggcgtgtattatcataagaacaataagagctggatggagtccgagtttagagtgtatagctctgcaaataattgtacctttgagtacgtgagccagccctttctgatggacctggagggaaaacaaggaaacttcaaaaacctgcgggaattcgttttcaaaaacatcgacggctatttcaagatctatagcaagcataccccaatcaacctcgtgagggacctcccccagggctttagcgcactggagccactggttgacctgcctatcggcattaatatcacaagatttcagaccctgctggcactgcatagaagctatctgacccctggagactcctctagtgggtggactgccggcgccgctgcctactatgtgggctatctgcagccacggacattcctgctgaaatacaatgagaacgggacaatcacagatgctgttgattgcgcactcgaccccctgtccgagacaaagtgcactctcaagagctttaccgtcgagaagggcatctatcagacctcaaacttcagggtgcagcccacagaatctatcgtgcgcttccctaatatcactaacctgtgtcctttcggtgaagtgttcaacgccaccaggtttgctagcgtgtatgcctggaacaggaagaggatctctaactgcgtcgccgactattccgtgctgtataacagcgcctccttctccacattcaaatgctatggagtgagcccgacaaaactgaacgatctctgctttacaaatgtctacgccgactcttttgtgatcagaggggacgaggtccggcagatcgcaccaggacagacaggcaagattgctgactacaactataagctgcctgacgacttcacaggatgtgtgatcgcatggaactcaaacaatctggactccaaagtcgggggcaactataattacctgtatcgcctgttccggaagtccaacctgaagcccttcgagagggacatcagtacagagatctatcaggctggctccaccccttgcaatggcgtcgaaggctttaattgttattttcccctgcagtcttacgggtttcagcctactaatggagttgggtaccagccatacagagtggtcgtgctcagcttcgagctcctgcatgctccagctacagtttgcgggccaaagaagtccactaacctggtgaagaataagtgcgtcaacttcaactttaacgggctcaccggcaccggcgtgctgactgagagcaacaagaagtttctgccatttcaacagtttggacgggacattgccgacaccaccgatgccgttcgggatccacagaccctggaaattctggacattacaccgtgcagcttcgggggcgtgagcgtgatcacacccggaaccaatacaagcaaccaggttgccgtcctgtatcaggatgtcaattgcacagaagtgccagttgctatccacgcagaccagctgactcccacatggcgggtgtatagcaccggatccaacgtgtttcagacccgcgccggatgtctcattggggccgagcacgtgaataacagctacgagtgcgacatccccattggcgccggcatttgtgcgtcttaccagactcagaccaactctcctagaagggccaggtccgttgctagtcagtctattattgcctataccatgagcctcggagctgagaatagcgtggcctactccaataattccatcgcaatccctactaacttcactatttctgtgaccaccgagatcctgcctgtgtctatgactaagactagcgttgattgtaccatgtatatttgtggcgactctaccgaatgttctaacctgctgcttcagtacggctcattttgcacacagctgaacagagccctgactgggatcgctgtggagcaggacaagaacacacaggaggtgtttgcacaggtgaagcagatctataagacccctcctattaaggatttcggcggattcaatttctcacagattctgccagaccccagtaagccttccaagaggagcttcatcgaggatctcctgtttaacaaggtgaccctggcagacgccggctttattaagcaatatggggattgcctgggcgacattgctgccagagacctgatttgcgcccagaaattcaatggcctcacagtgctgccacctctgctgaccgacgagatgatcgctcaatacactagcgcactgctggccggaaccatcacatcaggctggaccttcggggccggagcagcactgcagattccattcgccatgcagatggcctatagattcaacggcattggcgtcacacagaacgtgctgtacgaaaaccagaagctcatcgctaaccagtttaattccgcaattggaaagatccaagattcactcagctcaaccgcctctgcactcggaaagctgcaggacgtggtcaaccagaatgctcaggccctgaacacactcgtcaagcagctgtcctctaactttggcgctatcagctccgttctgaacgacattctgagccgcctggataaggtggaggctgaagtccagattgaccgcctgattaccggccggctgcagtctctgcaaacatacgtgacccagcagctgatcagagcagccgagatccgggcatccgcaaatctggcagcaactaagatgagcgaatgcgtgctgggccagtccaagcgggtggacttttgtggcaagggctaccacctgatgagcttcccccagagcgccccacatggcgttgtttttctgcacgtgacctatgtccctgctcaggaaaagaactttacaactgctcctgctatctgccatgacggcaaggcccacttcccacgggagggagtgtttgtgtccaatggcacacactggttcgtgacccagaggaacttctatgaaccccagatcatcaccactgacaataccttcgtgtctggaaattgcgacgtcgtgatcggcatcgttaacaacaccgtgtacgaccctctccagccagagctggactcctttaaggaggaactggataagtattttaagaaccacacaagcccagatgtggatctcggggacatctccggaattaacgcctccgtggtgaatatccagaaggagattgaccgcctaaatgaagttgccaagaacctcaatgagtctctgattgatctgcaggaactgggcaagtatgagcaggggtacattcccgaggctcctagggacggccaggcatacgtgcgcaaagacggcgagtgggtgctgctgtccacattcctgtaa

SEQ ID NO: 47 - DNA, 1308 bp, Artificial Sequence
  Synthetic
atgttcgtcttcctcgtgctgctcccactcgtttcttcccagtgtagcttcatcgaggatctcctgtttaacaaggtgaccctggcagacgccggctttattaagcaatatggggattgcctgggcgacattgctgccagagacctgatttgcgcccagaaattcaatggcctcacagtgctgccacctctgctgaccgacgagatgatcgctcaatacactagcgcactgctggccggaaccatcacatcaggctggaccttcggggccggagcagcactgcagattccattcgccatgcagatggcctatagattcaacggcattggcgtcacacagaacgtgctgtacgaaaaccagaagctcatcgctaaccagtttaattccgcaattggaaagatccaagattcactcagctcaaccgcctctgcactcggaaagctgcaggacgtggtcaaccagaatgctcaggccctgaacacactcgtcaagcagctgtcctctaactttggcgctatcagctccgttctgaacgacattctgagccgcctggataaggtggaggctgaagtccagattgaccgcctgattaccggccggctgcagtctctgcaaacatacgtgacccagcagctgatcagagcagccgagatccgggcatccgcaaatctggcagcaactaagatgagcgaatgcgtgctgggccagtccaagcgggtggacttttgtggcaagggctaccacctgatgagcttcccccagagcgccccacatggcgttgtttttctgcacgtgacctatgtccctgctcaggaaaagaactttacaactgctcctgctatctgccatgacggcaaggcccacttcccacgggagggagtgtttgtgtccaatggcacacactggttcgtgacccagaggaacttctatgaaccccagatcatcaccactgacaataccttcgtgtctggaaattgcgacgtcgtgatcggcatcgttaacaacaccgtgtacgaccctctccagccagagctggactcctttaaggaggaactggataagtattttaagaaccacacaagcccagatgtggatctcggggacatctccggaattaacgcctccgtggtgaatatccagaaggagattgaccgcctaaatgaagttgccaagaacctcaatgagtctctgattgatctgcaggaactgggcaagtatgagcaggggtacattcccgaggctcctagggacggccaggcatacgtgcgcaaagacggcgagtgggtgctgctgtccacattcctgtaa

SEQ ID NO: 48 - DNA, 3708 bp, Artificial Sequence
  Synthetic
atgttcgtcttcctcgtgctgctcccactcgtttcttcccagtgtgtcaacctgacaactaggactcagctgccaccagcctacaccaactccttcaccagaggcgtgtattacccagacaaggtgtttagaagcagcgtgctgcactctacccaggacctctttctgccctttttcagcaacgtgacatggtttcacgcaattcacgtgtccggcactaatggcacaaagcggttcgacaatccagtcctgcctttcaacgatggcgtctactttgcatctactgagaaatccaatatcattaggggatggatcttcggcacaaccctggattctaagacccagagcctgctgatcgtcaacaacgccacaaacgtggtcattaaggtttgcgagtttcagttctgtaacgatccttttctgggcgtgtattatcataagaacaataagagctggatggagtccgagtttagagtgtatagctctgcaaataattgtacctttgagtacgtgagccagccctttctgatggacctggagggaaaacaaggaaacttcaaaaacctgcgggaattcgttttcaaaaacatcgacggctatttcaagatctatagcaagcataccccaatcaacctcgtgagggacctcccccagggctttagcgcactggagccactggttgacctgcctatcggcattaatatcacaagatttcagaccctgctggcactgcatagaagctatctgacccctggagactcctctagtgggtggactgccggcgccgctgcctactatgtgggctatctgcagccacggacattcctgctgaaatacaatgagaacgggacaatcacagatgctgttgattgcgcactcgaccccctgtccgagacaaagtgcactctcaagagctttaccgtcgagaagggcatctatcagacctcaaacttcagggtgcagcccacagaatctatcgtgcgcttccctaatatcactaacctgtgtcctttcggtgaagtgttcaacgccaccaggtttgctagcgtgtatgcctggaacaggaagaggatctctaactgcgtcgccgactattccgtgctgtataacagcgcctccttctccacattcaaatgctatggagtgagcccgacaaaactgaacgatctctgctttacaaatgtctacgccgactcttttgtgatcagaggggacgaggtccggcagatcgcaccaggacagacaggcaagattgctgactacaactataagctgcctgacgacttcacaggatgtgtgatcgcatggaactcaaacaatctggactccaaagtcgggggcaactataattacctgtatcgcctgttccggaagtccaacctgaagcccttcgagagggacatcagtacagagatctatcaggctggctccaccccttgcaatggcgtcgaaggctttaattgttattttcccctgcagtcttacgggtttcagcctactaatggagttgggtaccagccatacagagtggtcgtgctcagcttcgagctcctgcatgctccagctacagtttgcgggccaaagaagtccactaacctggtgaagaataagtgcgtcaacttcaactttaacgggctcaccggcaccggcgtgctgactgagagcaacaagaagtttctgccatttcaacagtttggacgggacattgccgacaccaccgatgccgttcgggatccacagaccctggaaattctggacattacaccgtgcagcttcgggggcgtgagcgtgatcacacccggaaccaatacaagcaaccaggttgccgtcctgtatcaggatgtcaattgcacagaagtgccagttgctatccacgcagaccagctgactcccacatggcgggtgtatagcaccggatccaacgtgtttcagacccgcgccggatgtctcattggggccgagcacgtgaataacagctacgagtgcgacatccccattggcgccggcatttgtgcgtcttaccagactcagaccaactctcctagaagggccaggtccgttgctagtcagtctattattgcctataccatgagcctcggagctgagaatagcgtggcctactccaataattccatcgcaatccctactaacttcactatttctgtgaccaccgagatcctgcctgtgtctatgactaagactagcgttgattgtaccatgtatatttgtggcgactctaccgaatgttctaacctgctgcttcagtacggctcattttgcacacagctgaacagagccctgactgggatcgctgtggagcaggacaagaacacacaggaggtgtttgcacaggtgaagcagatctataagacccctcctattaaggatttcggcggattcaatttctcacagattctgccagaccccagtaagccttccaagaggagcttcatcgaggatctcctgtttaacaaggtgaccctggcagacgccggctttattaagcaatatggggattgcctgggcgacattgctgccagagacctgatttgcgcccagaaattcaatggcctcacagtgctgccacctctgctgaccgacgagatgatcgctcaatacactagcgcactgctggccggaaccatcacatcaggctggaccttcggggccggagcagcactgcagattccattcgccatgcagatggcctatagattcaacggcattggcgtcacacagaacgtgctgtacgaaaaccagaagctcatcgctaaccagtttaattccgcaattggaaagatccaagattcactcagctcaaccgcctctgcactcggaaagctgcaggacgtggtcaaccagaatgctcaggccctgaacacactcgtcaagcagctgtcctctaactttggcgctatcagctccgttctgaacgacattctgagccgcctggatcccccagaggctgaagtccagattgaccgcctgattaccggccggctgcagtctctgcaaacatacgtgacccagcagctgatcagagcagccgagatccgggcatccgcaaatctggcagcaactaagatgagcgaatgcgtgctgggccagtccaagcgggtggacttttgtggcaagggctaccacctgatgagcttcccccagagcgccccacatggcgttgtttttctgcacgtgacctatgtccctgctcaggaaaagaactttacaactgctcctgctatctgccatgacggcaaggcccacttcccacgggagggagtgtttgtgtccaatggcacacactggttcgtgacccagaggaacttctatgaaccccagatcatcaccactgacaataccttcgtgtctggaaattgcgacgtcgtgatcggcatcgttaacaacaccgtgtacgaccctctccagccagagctggactcctttaaggaggaactggataagtattttaagaaccacacaagcccagatgtggatctcggggacatctccggaattaacgcctccgtggtgaatatccagaaggagattgaccgcctaaatgaagttgccaagaacctcaatgagtctctgattgatctgcaggaactgggcaagtatgagcaggggtacattcccgaggctcctagggacggccaggcatacgtgcgcaaagacggcgagtgggtgctgctgtccacattcctgtaa

SEQ ID NO: 49 - DNA, 3708 bp, Artificial Sequence
  Synthetic
atgttcgtcttcctcgtgctgctcccactcgtttcttcccagtgtgtcaacctgacaactaggactcagctgccaccagcctacaccaactccttcaccagaggcgtgtattacccagacaaggtgtttagaagcagcgtgctgcactctacccaggacctctttctgccctttttcagcaacgtgacatggtttcacgcaattcacgtgtccggcactaatggcacaaagcggttcgacaatccagtcctgcctttcaacgatggcgtctactttgcatctactgagaaatccaatatcattaggggatggatcttcggcacaaccctggattctaagacccagagcctgctgatcgtcaacaacgccacaaacgtggtcattaaggtttgcgagtttcagttctgtaacgatccttttctgggcgtgtattatcataagaacaataagagctggatggagtccgagtttagagtgtatagctctgcaaataattgtacctttgagtacgtgagccagccctttctgatggacctggagggaaaacaaggaaacttcaaaaacctgcgggaattcgttttcaaaaacatcgacggctatttcaagatctatagcaagcataccccaatcaacctcgtgagggacctcccccagggctttagcgcactggagccactggttgacctgcctatcggcattaatatcacaagatttcagaccctgctggcactgcatagaagctatctgacccctggagactcctctagtgggtggactgccggcgccgctgcctactatgtgggctatctgcagccacggacattcctgctgaaatacaatgagaacgggacaatcacagatgctgttgattgcgcactcgaccccctgtccgagacaaagtgcactctcaagagctttaccgtcgagaagggcatctatcagacctcaaacttcagggtgcagcccacagaatctatcgtgcgcttccctaatatcactaacctgtgtcctttcggtgaagtgttcaacgccaccaggtttgctagcgtgtatgcctggaacaggaagaggatctctaactgcgtcgccgactattccgtgctgtataacagcgcctccttctccacattcaaatgctatggagtgagcccgacaaaactgaacgatctctgctttacaaatgtctacgccgactcttttgtgatcagaggggacgaggtccggcagatcgcaccaggacagacaggcaagattgctgactacaactataagctgcctgacgacttcacaggatgtgtgatcgcatggaactcaaacaatctggactccaaagtcgggggcaactataattacctgtatcgcctgttccggaagtccaacctgaagcccttcgagagggacatcagtacagagatctatcaggctggctccaccccttgcaatggcgtcgaaggctttaattgttattttcccctgcagtcttacgggtttcagcctactaatggagttgggtaccagccatacagagtggtcgtgctcagcttcgagctcctgcatgctccagctacagtttgcgggccaaagaagtccactaacctggtgaagaataagtgcgtcaacttcaactttaacgggctcaccggcaccggcgtgctgactgagagcaacaagaagtttctgccatttcaacagtttggacgggacattgccgacaccaccgatgccgttcgggatccacagaccctggaaattctggacattacaccgtgcagcttcgggggcgtgagcgtgatcacacccggaaccaatacaagcaaccaggttgccgtcctgtatcaggatgtcaattgcacagaagtgccagttgctatccacgcagaccagctgactcccacatggcgggtgtatagcaccggatccaacgtgtttcagacccgcgccggatgtctcattggggccgagcacgtgaataacagctacgagtgcgacatccccattggcgccggcatttgtgcgtcttaccagactcagaccaactctcctggctccgcctcttccgttgctagtcagtctattattgcctataccatgagcctcggagctgagaatagcgtggcctactccaataattccatcgcaatccctactaacttcactatttctgtgaccaccgagatcctgcctgtgtctatgactaagactagcgttgattgtaccatgtatatttgtggcgactctaccgaatgttctaacctgctgcttcagtacggctcattttgcacacagctgaacagagccctgactgggatcgctgtggagcaggacaagaacacacaggaggtgtttgcacaggtgaagcagatctataagacccctcctattaaggatttcggcggattcaatttctcacagattctgccagaccccagtaagccttccaagaggagcttcatcgaggatctcctgtttaacaaggtgaccctggcagacgccggctttattaagcaatatggggattgcctgggcgacattgctgccagagacctgatttgcgcccagaaattcaatggcctcacagtgctgccacctctgctgaccgacgagatgatcgctcaatacactagcgcactgctggccggaaccatcacatcaggctggaccttcggggccggagcagcactgcagattccattcgccatgcagatggcctatagattcaacggcattggcgtcacacagaacgtgctgtacgaaaaccagaagctcatcgctaaccagtttaattccgcaattggaaagatccaagattcactcagctcaaccgcctctgcactcggaaagctgcaggacgtggtcaaccagaatgctcaggccctgaacacactcgtcaagcagctgtcctctaactttggcgctatcagctccgttctgaacgacattctgagccgcctggatcccccagaggctgaagtccagattgaccgcctgattaccggccggctgcagtctctgcaaacatacgtgacccagcagctgatcagagcagccgagatccgggcatccgcaaatctggcagcaactaagatgagcgaatgcgtgctgggccagtccaagcgggtggacttttgtggcaagggctaccacctgatgagcttcccccagagcgccccacatggcgttgtttttctgcacgtgacctatgtccctgctcaggaaaagaactttacaactgctcctgctatctgccatgacggcaaggcccacttcccacgggagggagtgtttgtgtccaatggcacacactggttcgtgacccagaggaacttctatgaaccccagatcatcaccactgacaataccttcgtgtctggaaattgcgacgtcgtgatcggcatcgttaacaacaccgtgtacgaccctctccagccagagctggactcctttaaggaggaactggataagtattttaagaaccacacaagcccagatgtggatctcggggacatctccggaattaacgcctccgtggtgaatatccagaaggagattgaccgcctaaatgaagttgccaagaacctcaatgagtctctgattgatctgcaggaactgggcaagtatgagcaggggtacattcccgaggctcctagggacggccaggcatacgtgcgcaaagacggcgagtgggtgctgctgtccacattcctgtaa

SEQ ID NO: 50 - DNA, 1275 bp, Artificial Sequence
  Synthetic
atgcctaatatcactaacctgtgtcctttcggtgaagtgttcaacgccaccaggtttgctagcgtgtatgcctggaacaggaagaggatctctaactgcgtcgccgactattccgtgctgtataacagcgcctccttctccacattcaaatgctatggagtgagcccgacaaaactgaacgatctctgctttacaaatgtctacgccgactcttttgtgatcagaggggacgaggtccggcagatcgcaccaggacagacaggcaagattgctgactacaactataagctgcctgacgacttcacaggatgtgtgatcgcatggaactcaaacaatctggactccaaagtcgggggcaactataattacctgtatcgcctgttccggaagtccaacctgaagcccttcgagagggacatcagtacagagatctatcaggctggctccaccccttgcaatggcgtcgaaggctttaattgttattttcccctgcagtcttacgggtttcagcctactaatggagttgggtaccagccatacagagtggtcgtgctcagcttcgagctcctgcatgctccacctaagtcctgcgacaaaacccatacatgtccaccatgcccagctcctgaactgctcggcgggcctagtgttttcctcttccctcctaagcccaaggataccctcatgatctctcgcacaccagaagtgacctgcgtggtcgtggatgtctctcacgaggatcctgaagtgaagtttaactggtatgtcgacggagtggaagtgcacaacgccaagacaaagccaagagaagaacaatacaattctacttatagggtggtgtctgtgctgacagtgctgcaccaggattggctgaatggaaaagaatataagtgtaaggtctctaacaaggccctgcccgctccaattgagaagacaatttccaaggccaaggggcagcctcgggaacctcaggtgtacacactgcccccatccagggatgaactgactaaaaatcaggtgtctctgacatgcctggtgaaagggttttatccaagtgacattgctgtggagtgggagtctaatgggcagcctgaaaataactacaagaccacaccaccagtgctcgatagcgacgggtctttctttctgtattctaaactgaccgtggataaatctcggtggcagcagggaaacgtgttttcttgctcagtgatgcacgaagctctgcacaatcactatacacagaaatccctgtccctgtctccaggcaaataa

SEQ ID NO: 51 - protein, 156 aa, Artificial Sequence
  Synthetic
MFVFLVLLPLVSSQCLLFNKVTLADAGFIKQYGDCLGDIAAGGGGSSFIEDLLFNKVTLADAGFGGGGSPAICHDGKAHFPREGVFVSNGTHWFVTQRNFYEGGGGSSFIEDLLFNKVTLADAGFGGGGSLLFNKVTLADAGFIKQYGDCLGDIAA

SEQ ID NO: 52 - DNA, 471 bp, Artificial Sequence
  Synthetic
atgttcgtgttcctggtgctgctgccactggtttcctcccagtgtctgctgtttaacaaggttacactggcagacgccggcttcatcaagcagtatggggactgtctgggcgatatcgccgctggcggcggaggatctagcttcattgaggacctgctgttcaacaaagtgactctggctgacgccggatttggcggaggagggtctcctgccatttgtcatgacgggaaggctcatttccctagggagggggtttttgtctccaatggaactcactggttcgtgacccaaagaaacttctatgagggaggtggcggatcctcttttatcgaggacctgctgtttaacaaggtcactctggccgatgcaggcttcggaggaggagggtctctgctgttcaacaaagttactctggcagatgctgggttcattaagcagtacggcgactgtctgggcgatattgccgcctga

SEQ ID NO: 53 - protein, 118 aa, Artificial Sequence
  Synthetic
MFVFLVLLPLVSSQCSFIEDLLFNKVTLADAGFIKQYGDCLGDIAAGGGGSSFIEDLLFNKVTLADAGFIKQYGDCLGDIAAGGGGSSFIEDLLFNKVTLADAGFIKQYGDCLGDIAA

SEQ ID NO: 54 - DNA, 357 bp, Artificial Sequence
  Synthetic
atgttcgtgttcctggtcctgctacccctggtgtcctctcagtgctccttcattgaggacctgctgtttaataaggtgaccctggccgacgctgggttcatcaaacagtatggagattgtctgggagatattgcagcaggcgggggcggcagcagctttattgaggacctcctgttcaacaaggtgacccttgccgacgcagggtttattaagcagtatggcgactgtctgggagacattgcagccggcggcggcgggtcttcttttatcgaggacctgctgttcaacaaggtgacactggccgacgcaggctttattaagcagtacggggactgcctgggagacattgccgcctga

SEQ ID NO: 55 - protein, 392 aa, Artificial Sequence
  Synthetic
MFVFLVLLPLVSSQCLLFNKVTLADAGFIKQYGDCLGDIAAGGGGSSFIEDLLFNKVTLADAGFGGGGSPAICHDGKAHFPREGVFVSNGTHWFVTQRNFYEGGGGSSFIEDLLFNKVTLADAGFGGGGSLLFNKVTLADAGFIKQYGDCLGDIAAGGGGSPKSCDKTHTCPPCPAPELLGGPSVFLFPPKPKDTLMISRTPEVTCVVVDVSHEDPEVKFNWYVDGVEVHNAKTKPREEQYNSTYRVVSVLTVLHQDWLNGKEYKCKVSNKALPAPIEKTISKAKGQPREPQVYTLPPSRDELTKNQVSLTCLVKGFYPSDIAVEWESNGQPENNYKTTPPVLDSDGSFFLYSKLTVDKSRWQQGNVFSCSVMHEALHNHYTQKSLSLSPGK

SEQ ID NO: 56 - DNA, 1179 bp, Artificial Sequence
  Synthetic
atgtttgtgttcctcgttctgctgcctctggtgagctcccagtgtctgctgtttaacaaagtgactctggcagacgcaggctttatcaagcagtacggagactgtctcggggacattgcagccggcggcggaggctcatctttcattgaggacctgctgttcaacaaggtcactctggcagatgccggattcggaggagggggatctccagctatctgccatgacggaaaggctcattttcctcgggagggtgtgtttgtgtccaacggaacccattggttcgtcacacagcgcaacttctatgaaggaggggggggctccagcttcatcgaggacctgctctttaacaaagtgaccctggccgatgctggatttgggggagggggatccctgctgttcaacaaagttacactggccgacgcaggcttcatcaaacagtacggcgattgtttaggggacatcgccgctggcggcggaggatcacctaagtcctgcgacaaaacccatacatgtccaccatgcccagctcctgaactgctcggcgggcctagtgttttcctcttccctcctaagcccaaggataccctcatgatctctcgcacaccagaagtgacctgcgtggtcgtggatgtctctcacgaggatcctgaagtgaagtttaactggtatgtcgacggagtggaagtgcacaacgccaagacaaagccaagagaagaacaatacaattctacttatagggtggtgtctgtgctgacagtgctgcaccaggattggctgaatggaaaagaatataagtgtaaggtctctaacaaggccctgcccgctccaattgagaagacaatttccaaggccaaggggcagcctcgggaacctcaggtgtacacactgcccccatccagggatgaactgactaaaaatcaggtgtctctgacatgcctggtgaaagggttttatccaagtgacattgctgtggagtgggagtctaatgggcagcctgaaaataactacaagaccacaccaccagtgctcgatagcgacgggtctttctttctgtattctaaactgaccgtggataaatctcggtggcagcagggaaacgtgttttcttgctcagtgatgcacgaagctctgcacaatcactatacacagaaatccctgtccctgtctccaggcaaataa

SEQ ID NO: 57 - protein, 354 aa, Artificial Sequence
  Synthetic
MFVFLVLLPLVSSQCSFIEDLLFNKVTLADAGFIKQYGDCLGDIAAGGGGSSFIEDLLFNKVTLADAGFIKQYGDCLGDIAAGGGGSSFIEDLLFNKVTLADAGFIKQYGDCLGDIAAGGGGSPKSCDKTHTCPPCPAPELLGGPSVFLFPPKPKDTLMISRTPEVTCVVVDVSHEDPEVKFNWYVDGVEVHNAKTKPREEQYNSTYRVVSVLTVLHQDWLNGKEYKCKVSNKALPAPIEKTISKAKGQPREPQVYTLPPSRDELTKNQVSLTCLVKGFYPSDIAVEWESNGQPENNYKTTPPVLDSDGSFFLYSKLTVDKSRWQQGNVFSCSVMHEALHNHYTQKSLSLSPGK

SEQ ID NO: 58 - DNA, 1065 bp, Artificial Sequence
  Synthetic
atgttcgtgttcctggtcctgctgcctctggtgtcctctcagtgcagcttcatcgaggacctgctctttaacaaggtgactctcgcagatgctggcttcatcaagcagtacggagactgccttggagacatcgctgcaggcggagggggcagcagtttcatcgaggacctgctgtttaacaaggtgaccctggccgacgccgggttcattaagcaatacggcgattgtctgggagacatcgcagctgggggaggggggagctcttttattgaggacctgctgttcaacaaggtgactctggccgacgcagggttcatcaaacagtatggggactgtctgggagatatcgcagccgggggaggaggctcccctaagtcctgcgacaaaacccatacatgtccaccatgcccagctcctgaactgctcggcgggcctagtgttttcctcttccctcctaagcccaaggataccctcatgatctctcgcacaccagaagtgacctgcgtggtcgtggatgtctctcacgaggatcctgaagtgaagtttaactggtatgtcgacggagtggaagtgcacaacgccaagacaaagccaagagaagaacaatacaattctacttatagggtggtgtctgtgctgacagtgctgcaccaggattggctgaatggaaaagaatataagtgtaaggtctctaacaaggccctgcccgctccaattgagaagacaatttccaaggccaaggggcagcctcgggaacctcaggtgtacacactgcccccatccagggatgaactgactaaaaatcaggtgtctctgacatgcctggtgaaagggttttatccaagtgacattgctgtggagtgggagtctaatgggcagcctgaaaataactacaagaccacaccaccagtgctcgatagcgacgggtctttctttctgtattctaaactgaccgtggataaatctcggtggcagcagggaaacgtgttttcttgctcagtgatgcacgaagctctgcacaatcactatacacagaaatccctgtccctgtctccaggcaaataa

SEQ ID NO: 59 - DNA, 666 bp, Artificial Sequence
  Synthetic
atggcagacaacggtactattaccgttgaggagcttaaacaactcctggaacaatggaacctagtaataggtttcctattcctagcctggattatgttactacaatttgcctattctaatcggaacaggtttttgtacataataaagcttgttttcctctggctcttgtggccagtaacacttgcttgttttgtgcttgctgctgtctacagaattaattgggtgactggcgggattgcgattgcaatggcttgtattgtaggcttgatgtggcttagctacttcgttgcttccttcaggctgtttgctcgtacccgctcaatgtggtcattcaacccagaaacaaacattcttctcaatgtgcctctccgggggacaattgtgaccagaccgctcatggaaagtgaacttgtcattggtgctgtgatcattcgtggtcacttgcgaatggccggacactccctagggcgctgtgacattaaggacctgccaaaagagatcactgtggctacatcacgaacgctttcttattacaaattaggagcgtcgcagcgtgtaggcactgattcaggttttgctgcatacaaccgctaccgtattggaaactataaattaaatacagaccacgccggtagcaacgacaatattgctttgctagtacagtaa

SEQ ID NO: 60 - protein, 222 aa, Artificial Sequence
  Synthetic
MADSNGTITVEELKKLLEQWNLVIGFLFLTWICLLQFAYANRNRFLYIIKLIFLWLLWPVTLACFVLAAVYRINWITGGIAIAMACLVGLMWLSYFIASFRLFARTRSMWSFNPETNILLNVPLHGTILTRPLLESELVIGAVILRGHLRIAGHHLGRCDIKDLPKEITVATSRTLSYYKLGASQRVAGDSGFAAYSRYRIGNYKLNTDHSSSSDNIALLVQ

SEQ ID NO: 61 - DNA, 231 bp, Artificial Sequence
  Synthetic
atgtactcattcgtttcggaagaaacaggtacgttaatagttaatagcgtacttctttttcttgctttcgtggtattcttgctagtcacactagccatccttactgcgcttcgattgtgtgcgtactgctgcaatattgttaacgtgagtttagtaaaaccaacggtttacgtctactcgcgtgttaaaaatctgaactcttctgaaggagttcctgatcttctggtctaa

SEQ ID NO: 62 - protein, 75 aa, Artificial Sequence
  Synthetic
MYSFVSEETGTLIVNSVLLFLAFVVFLLVTLAILTALRLCAYCCNIVNVSLVKPSFYVYSRVKNLNSSRVPDLLV

SEQ ID NO: 63 - DNA, 1260 bp, Artificial Sequence
  Synthetic
atgtctgataatggaccccaaaatcagcgaaatgcaccccgcattacgtttggtggaccctcagattcaactggcagtaaccagaatggagaacgcagtggggcgcgatcaaaacaacgtcggccccaaggtttacccaataatactgcgtcttggttcaccgctctcactcaacatggcaaggaagaccttaaattccctcgaggacaaggcgttccaattaacaccaatagcagtccagatgaccaaattggctactaccgaagagctaccagacgaattcgtggtggtgacggtaaaatgaaagatctcagtccaagatggtatttctactacctaggaactgggccagaagctggacttccctatggtgctaacaaagacggcatcatatgggttgcaactgagggagccttgaatacaccaaaagatcacattggcacccgcaatcctgctaacaatgctgcaatcgtgctacaacttcctcaaggaacaacattgccaaaaggcttctacgcagaagggagcagaggcggcagtcaagcctcttctcgttcctcatcacgtagtcgcaacagttcaagaaattcaactccaggcagcagtaggggaacttctcctgctagaatggctggcaatggcggtgatgctgctcttgctttgctgctgcttgacagattgaaccagcttgagagcaaaatgtctggtaaaggccaacaacaacaaggccaaactgtcactaagaaatctgctgctgaggcttctaagaagcctcggcaaaaacgtactgccactaaagcatacaatgtaacacaagctttcggcagacgtggtccagaacaaacccaaggaaattttggggaccaggaactaatcagacaaggaactgattacaaacattggccgcaaattgcacaatttgcccccagcgcttcagcgttcttcggaatgtcgcgcattggcatggaagtcacaccttcgggaacgtggttgacctacacaggtgccatcaaattggatgacaaagatccaaatttcaaagatcaagtcattttgctgaataagcatattgacgcatacaaaacattcccaccaacagagcctaaaaaggacaaaaagaagaaggctgatgaaactcaagccttaccgcagagacagaagaaacagcaaactgtgactcttcttcctgctgcagatttggatgatttctccaaacaattgcaacaatccatgagcagtgctgactcaactcaggcctaa

SEQ ID NO: 64 - protein, 419 aa, Artificial Sequence
  Synthetic
MSDNGPQNQRNAPRITFGGPSDSTGSNQNGERSGARSKQRRPQGLPNNTASWFTALTQHGKEDLKFPRGQGVPINTNSSPDDQIGYYRRATRRIRGGDGKMKDLSPRWYFYYLGTGPEAGLPYGANKDGIIWVATEGALNTPKDHIGTRNPANNAAIVLQLPQGTTLPKGFYAEGSRGGSQASSRSSSRSRNSSRNLTPGSSRGTSPARMAGNGGDAALALLLLDRLNQLESKMSGKGQQQQGQTVTKKSAAEASKKPRQKRTATKAYNVTQAFGRRGPEQTQGNFGDQELIRQGTDYKHWPQIAQFAPSASAFFGMSRIGMEVTPSGTWLTYTGAIKLDDKDPNFKDQVILLNKHIDAYKTFPPTEPKKDKKKKADETQALPQRQKKQQTVTLLPAADLDDFSKQLQQSMSSADSTQA

SEQ ID NO: 65 - DNA, 1227 bp, Artificial Sequence
  Synthetic
atgttcgtcttcctcgtgctgctcccactcgtttcttcccagtgtagcttcatcgaggatctcctgtttaacaaggtgaccctggcagacgccggctttattaagcaatatggggattgcctgggcgacattgctgccagagacctgatttgcgcccagaaattcaatggcctcacagtgctgccacctctgctgaccgacgagatgatcgctcaatacactagcgcactgctggccggaaccatcacatcaggctggaccttcggggccggagcagcactgcagattccattcgccatgcagatggcctatagattcaacggcattggcgtcacacagaacgtgctgtacgaaaaccagaagctcatcgctaaccagtttaattccgcaattggaaagatccaagattcactcagctcaaccgcctctgcactcggaaagctgcaggacgtggtcaaccagaatgctcaggccctgaacacactcgtcaagcagctgtcctctaactttggcgctatcagctccgttctgaacgacattctgagccgcctggataaggtggaggctgaagtccagattgaccgcctgattaccggccggctgcagtctctgcaaacatacgtgacccagcagctgatcagagcagccgagatccgggcatccgcaaatctggcagcaactaagatgagcgaatgcgtgctgggccagtccaagcgggtggacttttgtggcaagggctaccacctgatgagcttcccccagagcgccccacatggcgttgtttttctgcacgtgacctatgtccctgctcaggaaaagaactttacaactgctcctgctatctgccatgacggcaaggcccacttcccacgggagggagtgtttgtgtccaatggcacacactggttcgtgacccagaggaacttctatgaaccccagatcatcaccactgacaataccttcgtgtctggaaattgcgacgtcgtgatcggcatcgttaacaacaccgtgtacgaccctctccagccagagctggactcctttaaggaggaactggataagtattttaagaaccacacaagcccagatgtggatctcggggacatctccggaattaacgcctccgtggtgaatatccagaaggagattgaccgcctaaatgaagttgccaagaacctcaatgagtctctgattgatctgcaggaactgggcaagtatgagcagtaa

SEQ ID NO: 66 - protein, 803 aa, Artificial Sequence
  Synthetic
MFVFLVLLPLVSSQCSFIEDLLFNKVTLADAGFIKQYGDCLGDIAARDLICAQKFNGLTVLPPLLTDEMIAQYTSALLAGTITSGWTFGAGAALQIPFAMQMAYRFNGIGVTQNVLYENQKLIANQFNSAIGKIQDSLSSTASALGKLQDVVNQNAQALNTLVKQLSSNFGAISSVLNDILSRLDKVEAEVQIDRLITGRLQSLQTYVTQQLIRAAEIRASANLAATKMSECVLGQSKRVDFCGKGYHLMSFPQSAPHGVVFLHVTYVPAQEKNFTTAPAICHDGKAHFPREGVFVSNGTHWFVTQRNFYEPQIITTDNTFVSGNCDVVIGIVNNTVYDPLQPELDSFKEELDKYFKNHTSPDVDLGDISGINASVVNIQKEIDRLNEVAKNLNESLIDLQELGKYEQQCSFIEDLLFNKVTLADAGFIKQYGDCLGDIAARDLICAQKFNGLTVLPPLLTDEMIAQYTSALLAGTITSGWTFGAGAALQIPFAMQMAYRFNGIGVTQNVLYENQKLIANQFNSAIGKIQDSLSSTASALGKLQDVVNQNAQALNTLVKQLSSNFGAISSVLNDILSRLDKVEAEVQIDRLITGRLQSLQTYVTQQLIRAAEIRASANLAATKMSECVLGQSKRVDFCGKGYHLMSFPQSAPHGVVFLHVTYVPAQEKNFTTAPAICHDGKAHFPREGVFVSNGTHWFVTQRNFYEPQIITTDNTFVSGNCDVVIGIVNNTVYDPLQPELDSFKEELDKYFKNHTSPDVDLGDISGINASVVNIQKEIDRLNEVAKNLNESLIDLQELGKYEQ

SEQ ID NO: 67 - DNA, 1812 bp, Artificial Sequence
  Synthetic
atgttcgtcttcctcgtgctgctcccactcgtttcttcccagtgttccgttgctagtcagtctattattgcctataccatgagcctcggagctgagaatagcgtggcctactccaataattccatcgcaatccctactaacttcactatttctgtgaccaccgagatcctgcctgtgtctatgactaagactagcgttgattgtaccatgtatatttgtggcgactctaccgaatgttctaacctgctgcttcagtacggctcattttgcacacagctgaacagagccctgactgggatcgctgtggagcaggacaagaacacacaggaggtgtttgcacaggtgaagcagatctataagacccctcctattaaggatttcggcggattcaatttctcacagattctgccagaccccagtaagccttccaagaggagcttcatcgaggatctcctgtttaacaaggtgaccctggcagacgccggctttattaagcaatatggggattgcctgggcgacattgctgccagagacctgatttgcgcccagaaattcaatggcctcacagtgctgccacctctgctgaccgacgagatgatcgctcaatacactagcgcactgctggccggaaccatcacatcaggctggaccttcggggccggagcagcactgcagattccattcgccatgcagatggcctatagattcaacggcattggcgtcacacagaacgtgctgtacgaaaaccagaagctcatcgctaaccagtttaattccgcaattggaaagatccaagattcactcagctcaaccgcctctgcactcggaaagctgcaggacgtggtcaaccagaatgctcaggccctgaacacactcgtcaagcagctgtcctctaactttggcgctatcagctccgttctgaacgacattctgagccgcctggataaggtggaggctgaagtccagattgaccgcctgattaccggccggctgcagtctctgcaaacatacgtgacccagcagctgatcagagcagccgagatccgggcatccgcaaatctggcagcaactaagatgagcgaatgcgtgctgggccagtccaagcgggtggacttttgtggcaagggctaccacctgatgagcttcccccagagcgccccacatggcgttgtttttctgcacgtgacctatgtccctgctcaggaaaagaactttacaactgctcctgctatctgccatgacggcaaggcccacttcccacgggagggagtgtttgtgtccaatggcacacactggttcgtgacccagaggaacttctatgaaccccagatcatcaccactgacaataccttcgtgtctggaaattgcgacgtcgtgatcggcatcgttaacaacaccgtgtacgaccctctccagccagagctggactcctttaaggaggaactggataagtattttaagaaccacacaagcccagatgtggatctcggggacatctccggaattaacgcctccgtggtgaatatccagaaggagattgaccgcctaaatgaagttgccaagaacctcaatgagtctctgattgatctgcaggaactgggcaagtatgagcagtatatcaaatggccctggtacatttggctggggtttatcgccggactgattgccatcgtcatggtgaccatcatgctgtgttgcatgacctcctgttgttcctgtctgaagggctgctgtagttgcggctcttgctgtaaattcgacgaagatgatagcgagcccgtgctgaagggcgtgaagctgcattatacctga

SEQ ID NO: 68 - protein, 603 aa, Artificial Sequence
  Synthetic
MFVFLVLLPLVSSQCSVASQSIIAYTMSLGAENSVAYSNNSIAIPTNFTISVTTEILPVSMTKTSVDCTMYICGDSTECSNLLLQYGSFCTQLNRALTGIAVEQDKNTQEVFAQVKQIYKTPPIKDFGGFNFSQILPDPSKPSKRSFIEDLLFNKVTLADAGFIKQYGDCLGDIAARDLICAQKFNGLTVLPPLLTDEMIAQYTSALLAGTITSGWTFGAGAALQIPFAMQMAYRFNGIGVTQNVLYENQKLIANQFNSAIGKIQDSLSSTASALGKLQDVVNQNAQALNTLVKQLSSNFGAISSVLNDILSRLDKVEAEVQIDRLITGRLQSLQTYVTQQLIRAAEIRASANLAATKMSECVLGQSKRVDFCGKGYHLMSFPQSAPHGVVFLHVTYVPAQEKNFTTAPAICHDGKAHFPREGVFVSNGTHWFVTQRNFYEPQIITTDNTFVSGNCDVVIGIVNNTVYDPLQPELDSFKEELDKYFKNHTSPDVDLGDISGINASVVNIQKEIDRLNEVAKNLNESLIDLQELGKYEQYIKWPWYIWLGFIAGLIAIVMVTIMLCCMTSCCSCLKGCCSCGSCCKFDEDDSEPVLKGVKLHYT

SEQ ID NO: 69 - DNA, 1812 bp, Artificial Sequence
  Synthetic
atgttcgtcttcctcgtgctgctcccactcgtttcttcccagtgttccgttgctagtcagtctattattgcctataccatgagcctcggagctgagaatagcgtggcctactccaataattccatcgcaatccctactaacttcactatttctgtgaccaccgagatcctgcctgtgtctatgactaagactagcgttgattgtaccatgtatatttgtggcgactctaccgaatgttctaacctgctgcttcagtacggctcattttgcacacagctgaacagagccctgactgggatcgctgtggagcaggacaagaacacacaggaggtgtttgcacaggtgaagcagatctataagacccctcctattaaggatttcggcggattcaatttctcacagattctgccagaccccagtaagccttccaagaggagcttcatcgaggatctcctgtttaacaaggtgaccctggcagacgccggctttattaagcaatatggggattgcctgggcgacattgctgccagagacctgatttgcgcccagaaattcaatggcctcacagtgctgccacctctgctgaccgacgagatgatcgctcaatacactagcgcactgctggccggaaccatcacatcaggctggaccttcggggccggagcagcactgcagattccattcgccatgcagatggcctatagattcaacggcattggcgtcacacagaacgtgctgtacgaaaaccagaagctcatcgctaaccagtttaattccgcaattggaaagatccaagattcactcagctcaaccgcctctgcactcggaaagctgcaggacgtggtcaaccagaatgctcaggccctgaacacactcgtcaagcagctgtcctctaactttggcgctatcagctccgttctgaacgacattctgagccgcctggatcccccagaggctgaagtccagattgaccgcctgattaccggccggctgcagtctctgcaaacatacgtgacccagcagctgatcagagcagccgagatccgggcatccgcaaatctggcagcaactaagatgagcgaatgcgtgctgggccagtccaagcgggtggacttttgtggcaagggctaccacctgatgagcttcccccagagcgccccacatggcgttgtttttctgcacgtgacctatgtccctgctcaggaaaagaactttacaactgctcctgctatctgccatgacggcaaggcccacttcccacgggagggagtgtttgtgtccaatggcacacactggttcgtgacccagaggaacttctatgaaccccagatcatcaccactgacaataccttcgtgtctggaaattgcgacgtcgtgatcggcatcgttaacaacaccgtgtacgaccctctccagccagagctggactcctttaaggaggaactggataagtattttaagaaccacacaagcccagatgtggatctcggggacatctccggaattaacgcctccgtggtgaatatccagaaggagattgaccgcctaaatgaagttgccaagaacctcaatgagtctctgattgatctgcaggaactgggcaagtatgagcagtatatcaaatggccctggtacatttggctggggtttatcgccggactgattgccatcgtcatggtgaccatcatgctgtgttgcatgacctcctgttgttcctgtctgaagggctgctgtagttgcggctcttgctgtaaattcgacgaagatgatagcgagcccgtgctgaagggcgtgaagctgcattatacctga

SEQ ID NO: 70 - protein, 603 aa, Artificial Sequence
  Synthetic
MFVFLVLLPLVSSQCSVASQSIIAYTMSLGAENSVAYSNNSIAIPTNFTISVTTEILPVSMTKTSVDCTMYICGDSTECSNLLLQYGSFCTQLNRALTGIAVEQDKNTQEVFAQVKQIYKTPPIKDFGGFNFSQILPDPSKPSKRSFIEDLLFNKVTLADAGFIKQYGDCLGDIAARDLICAQKFNGLTVLPPLLTDEMIAQYTSALLAGTITSGWTFGAGAALQIPFAMQMAYRFNGIGVTQNVLYENQKLIANQFNSAIGKIQDSLSSTASALGKLQDVVNQNAQALNTLVKQLSSNFGAISSVLNDILSRLDPPEAEVQIDRLITGRLQSLQTYVTQQLIRAAEIRASANLAATKMSECVLGQSKRVDFCGKGYHLMSFPQSAPHGVVFLHVTYVPAQEKNFTTAPAICHDGKAHFPREGVFVSNGTHWFVTQRNFYEPQIITTDNTFVSGNCDVVIGIVNNTVYDPLQPELDSFKEELDKYFKNHTSPDVDLGDISGINASVVNIQKEIDRLNEVAKNLNESLIDLQELGKYEQYIKWPWYIWLGFIAGLIAIVMVTIMLCCMTSCCSCLKGCCSCGSCCKFDEDDSEPVLKGVKLHYT

SEQ ID NO: 71 - DNA, 1770 bp, Artificial Sequence; identical to SEQ ID NO: 32
  Synthetic

SEQ ID NO: 72 - protein, 589 aa, Artificial Sequence; identical to SEQ ID NO: 4
  Synthetic

SEQ ID NO: 73 - DNA, 1617 bp, Artificial Sequence
  Synthetic
atgttcgtcttcctcgtgctgctcccactcgtttcttcccagtgttccgttgctagtcagtctattattgcctataccatgagcctcggagctgagaatagcgtggcctactccaataattccatcgcaatccctactaacttcactatttctgtgaccaccgagatcctgcctgtgtctatgactaagactagcgttgattgtaccatgtatatttgtggcgactctaccgaatgttctaacctgctgcttcagtacggctcattttgcacacagctgaacagagccctgactgggatcgctgtggagcaggacaagaacacacaggaggtgtttgcacaggtgaagcagatctataagacccctcctattaaggatttcggcggattcaatttctcacagattctgccagaccccagtaagccttccaagaggagcttcatcgaggatctcctgtttaacaaggtgaccctggcagacgccggctttattaagcaatatggggattgcctgggcgacattgctgccagagacctgatttgcgcccagaaattcaatggcctcacagtgctgccacctctgctgaccgacgagatgatcgctcaatacactagcgcactgctggccggaaccatcacatcaggctggaccttcggggccggagcagcactgcagattccattcgccatgcagatggcctatagattcaacggcattggcgtcacacagaacgtgctgtacgaaaaccagaagctcatcgctaaccagtttaattccgcaattggaaagatccaagattcactcagctcaaccgcctctgcactcggaaagctgcaggacgtggtcaaccagaatgctcaggccctgaacacactcgtcaagcagctgtcctctaactttggcgctatcagctccgttctgaacgacattctgagccgcctggataaggtggaggctgaagtccagattgaccgcctgattaccggccggctgcagtctctgcaaacatacgtgacccagcagctgatcagagcagccgagatccgggcatccgcaaatctggcagcaactaagatgagcgaatgcgtgctgggccagtccaagcgggtggacttttgtggcaagggctaccacctgatgagcttcccccagagcgccccacatggcgttgtttttctgcacgtgacctatgtccctgctcaggaaaagaactttacaactgctcctgctatctgccatgacggcaaggcccacttcccacgggagggagtgtttgtgtccaatggcacacactggttcgtgacccagaggaacttctatgaaccccagatcatcaccactgacaataccttcgtgtctggaaattgcgacgtcgtgatcggcatcgttaacaacaccgtgtacgaccctctccagccagagctggactcctttaaggaggaactggataagtattttaagaaccacacaagcccagatgtggatctcggggacatctccggaattaacgcctccgtggtgaatatccagaaggagattgaccgcctaaatgaagttgccaagaacctcaatgagtctctgattgatctgcaggaactgggcaagtatgagcagtga

SEQ ID NO: 74 - protein, 538 aa, Artificial Sequence
  Synthetic
MFVFLVLLPLVSSQCSVASQSIIAYTMSLGAENSVAYSNNSIAIPTNFTISVTTEILPVSMTKTSVDCTMYICGDSTECSNLLLQYGSFCTQLNRALTGIAVEQDKNTQEVFAQVKQIYKTPPIKDFGGFNFSQILPDPSKPSKRSFIEDLLFNKVTLADAGFIKQYGDCLGDIAARDLICAQKFNGLTVLPPLLTDEMIAQYTSALLAGTITSGWTFGAGAALQIPFAMQMAYRFNGIGVTQNVLYENQKLIANQFNSAIGKIQDSLSSTASALGKLQDVVNQNAQALNTLVKQLSSNFGAISSVLNDILSRLDKVEAEVQIDRLITGRLQSLQTYVTQQLIRAAEIRASANLAATKMSECVLGQSKRVDFCGKGYHLMSFPQSAPHGVVFLHVTYVPAQEKNFTTAPAICHDGKAHFPREGVFVSNGTHWFVTQRNFYEPQIITTDNTFVSGNCDVVIGIVNNTVYDPLQPELDSFKEELDKYFKNHTSPDVDLGDISGINASVVNIQKEIDRLNEVAKNLNESLIDLQELGKYEQ

SEQ ID NO: 75 - DNA, 1698 bp, Artificial Sequence
  Synthetic
atgttcgtcttcctcgtgctgctcccactcgtttcttcccagtgttccgttgctagtcagtctattattgcctataccatgagcctcggagctgagaatagcgtggcctactccaataattccatcgcaatccctactaacttcactatttctgtgaccaccgagatcctgcctgtgtctatgactaagactagcgttgattgtaccatgtatatttgtggcgactctaccgaatgttctaacctgctgcttcagtacggctcattttgcacacagctgaacagagccctgactgggatcgctgtggagcaggacaagaacacacaggaggtgtttgcacaggtgaagcagatctataagacccctcctattaaggatttcggcggattcaatttctcacagattctgccagaccccagtaagccttccaagaggagcttcatcgaggatctcctgtttaacaaggtgaccctggcagacgccggctttattaagcaatatggggattgcctgggcgacattgctgccagagacctgatttgcgcccagaaattcaatggcctcacagtgctgccacctctgctgaccgacgagatgatcgctcaatacactagcgcactgctggccggaaccatcacatcaggctggaccttcggggccggagcagcactgcagattccattcgccatgcagatggcctatagattcaacggcattggcgtcacacagaacgtgctgtacgaaaaccagaagctcatcgctaaccagtttaattccgcaattggaaagatccaagattcactcagctcaaccgcctctgcactcggaaagctgcaggacgtggtcaaccagaatgctcaggccctgaacacactcgtcaagcagctgtcctctaactttggcgctatcagctccgttctgaacgacattctgagccgcctggataaggtggaggctgaagtccagattgaccgcctgattaccggccggctgcagtctctgcaaacatacgtgacccagcagctgatcagagcagccgagatccgggcatccgcaaatctggcagcaactaagatgagcgaatgcgtgctgggccagtccaagcgggtggacttttgtggcaagggctaccacctgatgagcttcccccagagcgccccacatggcgttgtttttctgcacgtgacctatgtccctgctcaggaaaagaactttacaactgctcctgctatctgccatgacggcaaggcccacttcccacgggagggagtgtttgtgtccaatggcacacactggttcgtgacccagaggaacttctatgaaccccagatcatcaccactgacaataccttcgtgtctggaaattgcgacgtcgtgatcggcatcgttaacaacaccgtgtacgaccctctccagccagagctggactcctttaaggaggaactggataagtattttaagaaccacacaagcccagatgtggatctcggggacatctccggaattaacgcctccgtggtgaatatccagaaggagattgaccgcctaaatgaagttgccaagaacctcaatgagtctctgattgatctgcaggaactgggcaagtatgagcaggggtacattcccgaggctcctagggacggccaggcatacgtgcgcaaagacggcgagtgggtgctgctgtccacattcctgtga

SEQ ID NO: 76 - protein, 565 aa, Artificial Sequence
  Synthetic
MFVFLVLLPLVSSQCSVASQSIIAYTMSLGAENSVAYSNNSIAIPTNFTISVTTEILPVSMTKTSVDCTMYICGDSTECSNLLLQYGSFCTQLNRALTGIAVEQDKNTQEVFAQVKQIYKTPPIKDFGGFNFSQILPDPSKPSKRSFIEDLLFNKVTLADAGFIKQYGDCLGDIAARDLICAQKFNGLTVLPPLLTDEMIAQYTSALLAGTITSGWTFGAGAALQIPFAMQMAYRFNGIGVTQNVLYENQKLIANQFNSAIGKIQDSLSSTASALGKLQDVVNQNAQALNTLVKQLSSNFGAISSVLNDILSRLDKVEAEVQIDRLITGRLQSLQTYVTQQLIRAAEIRASANLAATKMSECVLGQSKRVDFCGKGYHLMSFPQSAPHGVVFLHVTYVPAQEKNFTTAPAICHDGKAHFPREGVFVSNGTHWFVTQRNFYEPQIITTDNTFVSGNCDVVIGIVNNTVYDPLQPELDSFKEELDKYFKNHTSPDVDLGDISGINASVVNIQKEIDRLNEVAKNLNESLIDLQELGKYEQGYIPEAPRDGQAYVRKDGEWVLLSTFL

SEQ ID NO: 77 - DNA, 1617 bp, Artificial Sequence
  Synthetic
atgttcgtcttcctcgtgctgctcccactcgtttcttcccagtgttccgttgctagtcagtctattattgcctataccatgagcctcggagctgagaatagcgtggcctactccaataattccatcgcaatccctactaacttcactatttctgtgaccaccgagatcctgcctgtgtctatgactaagactagcgttgattgtaccatgtatatttgtggcgactctaccgaatgttctaacctgctgcttcagtacggctcattttgcacacagctgaacagagccctgactgggatcgctgtggagcaggacaagaacacacaggaggtgtttgcacaggtgaagcagatctataagacccctcctattaaggatttcggcggattcaatttctcacagattctgccagaccccagtaagccttccaagaggagcttcatcgaggatctcctgtttaacaaggtgaccctggcagacgccggctttattaagcaatatggggattgcctgggcgacattgctgccagagacctgatttgcgcccagaaattcaatggcctcacagtgctgccacctctgctgaccgacgagatgatcgctcaatacactagcgcactgctggccggaaccatcacatcaggctggaccttcggggccggagcagcactgcagattccattcgccatgcagatggcctatagattcaacggcattggcgtcacacagaacgtgctgtacgaaaaccagaagctcatcgctaaccagtttaattccgcaattggaaagatccaagattcactcagctcaaccgcctctgcactcggaaagctgcaggacgtggtcaaccagaatgctcaggccctgaacacactcgtcaagcagctgtcctctaactttggcgctatcagctccgttctgaacgacattctgagccgcctggatcccccagaggctgaagtccagattgaccgcctgattaccggccggctgcagtctctgcaaacatacgtgacccagcagctgatcagagcagccgagatccgggcatccgcaaatctggcagcaactaagatgagcgaatgcgtgctgggccagtccaagcgggtggacttttgtggcaagggctaccacctgatgagcttcccccagagcgccccacatggcgttgtttttctgcacgtgacctatgtccctgctcaggaaaagaactttacaactgctcctgctatctgccatgacggcaaggcccacttcccacgggagggagtgtttgtgtccaatggcacacactggttcgtgacccagaggaacttctatgaaccccagatcatcaccactgacaataccttcgtgtctggaaattgcgacgtcgtgatcggcatcgttaacaacaccgtgtacgaccctctccagccagagctggactcctttaaggaggaactggataagtattttaagaaccacacaagcccagatgtggatctcggggacatctccggaattaacgcctccgtggtgaatatccagaaggagattgaccgcctaaatgaagttgccaagaacctcaatgagtctctgattgatctgcaggaactgggcaagtatgagcagtga

SEQ ID NO: 78 - protein, 538 aa, Artificial Sequence
  Synthetic
MFVFLVLLPLVSSQCSVASQSIIAYTMSLGAENSVAYSNNSIAIPTNFTISVTTEILPVSMTKTSVDCTMYICGDSTECSNLLLQYGSFCTQLNRALTGIAVEQDKNTQEVFAQVKQIYKTPPIKDFGGFNFSQILPDPSKPSKRSFIEDLLFNKVTLADAGFIKQYGDCLGDIAARDLICAQKFNGLTVLPPLLTDEMIAQYTSALLAGTITSGWTFGAGAALQIPFAMQMAYRFNGIGVTQNVLYENQKLIANQFNSAIGKIQDSLSSTASALGKLQDVVNQNAQALNTLVKQLSSNFGAISSVLNDILSRLDPPEAEVQIDRLITGRLQSLQTYVTQQLIRAAEIRASANLAATKMSECVLGQSKRVDFCGKGYHLMSFPQSAPHGVVFLHVTYVPAQEKNFTTAPAICHDGKAHFPREGVFVSNGTHWFVTQRNFYEPQIITTDNTFVSGNCDVVIGIVNNTVYDPLQPELDSFKEELDKYFKNHTSPDVDLGDISGINASVVNIQKEIDRLNEVAKNLNESLIDLQELGKYEQ

SEQ ID NO: 79 - DNA, 1698 bp, Artificial Sequence
  Synthetic
atgttcgtcttcctcgtgctgctcccactcgtttcttcccagtgttccgttgctagtcagtctattattgcctataccatgagcctcggagctgagaatagcgtggcctactccaataattccatcgcaatccctactaacttcactatttctgtgaccaccgagatcctgcctgtgtctatgactaagactagcgttgattgtaccatgtatatttgtggcgactctaccgaatgttctaacctgctgcttcagtacggctcattttgcacacagctgaacagagccctgactgggatcgctgtggagcaggacaagaacacacaggaggtgtttgcacaggtgaagcagatctataagacccctcctattaaggatttcggcggattcaatttctcacagattctgccagaccccagtaagccttccaagaggagcttcatcgaggatctcctgtttaacaaggtgaccctggcagacgccggctttattaagcaatatggggattgcctgggcgacattgctgccagagacctgatttgcgcccagaaattcaatggcctcacagtgctgccacctctgctgaccgacgagatgatcgctcaatacactagcgcactgctggccggaaccatcacatcaggctggaccttcggggccggagcagcactgcagattccattcgccatgcagatggcctatagattcaacggcattggcgtcacacagaacgtgctgtacgaaaaccagaagctcatcgctaaccagtttaattccgcaattggaaagatccaagattcactcagctcaaccgcctctgcactcggaaagctgcaggacgtggtcaaccagaatgctcaggccctgaacacactcgtcaagcagctgtcctctaactttggcgctatcagctccgttctgaacgacattctgagccgcctggatcccccagaggctgaagtccagattgaccgcctgattaccggccggctgcagtctctgcaaacatacgtgacccagcagctgatcagagcagccgagatccgggcatccgcaaatctggcagcaactaagatgagcgaatgcgtgctgggccagtccaagcgggtggacttttgtggcaagggctaccacctgatgagcttcccccagagcgccccacatggcgttgtttttctgcacgtgacctatgtccctgctcaggaaaagaactttacaactgctcctgctatctgccatgacggcaaggcccacttcccacgggagggagtgtttgtgtccaatggcacacactggttcgtgacccagaggaacttctatgaaccccagatcatcaccactgacaataccttcgtgtctggaaattgcgacgtcgtgatcggcatcgttaacaacaccgtgtacgaccctctccagccagagctggactcctttaaggaggaactggataagtattttaagaaccacacaagcccagatgtggatctcggggacatctccggaattaacgcctccgtggtgaatatccagaaggagattgaccgcctaaatgaagttgccaagaacctcaatgagtctctgattgatctgcaggaactgggcaagtatgagcaggggtacattcccgaggctcctagggacggccaggcatacgtgcgcaaagacggcgagtgggtgctgctgtccacattcctgtga

SEQ ID NO: 80 - protein, 565 aa, Artificial Sequence
  Synthetic
MFVFLVLLPLVSSQCSVASQSIIAYTMSLGAENSVAYSNNSIAIPTNFTISVTTEILPVSMTKTSVDCTMYICGDSTECSNLLLQYGSFCTQLNRALTGIAVEQDKNTQEVFAQVKQIYKTPPIKDFGGFNFSQILPDPSKPSKRSFIEDLLFNKVTLADAGFIKQYGDCLGDIAARDLICAQKFNGLTVLPPLLTDEMIAQYTSALLAGTITSGWTFGAGAALQIPFAMQMAYRFNGIGVTQNVLYENQKLIANQFNSAIGKIQDSLSSTASALGKLQDVVNQNAQALNTLVKQLSSNFGAISSVLNDILSRLDPPEAEVQIDRLITGRLQSLQTYVTQQLIRAAEIRASANLAATKMSECVLGQSKRVDFCGKGYHLMSFPQSAPHGVVFLHVTYVPAQEKNFTTAPAICHDGKAHFPREGVFVSNGTHWFVTQRNFYEPQIITTDNTFVSGNCDVVIGIVNNTVYDPLQPELDSFKEELDKYFKNHTSPDVDLGDISGINASVVNIQKEIDRLNEVAKNLNESLIDLQELGKYEQGYIPEAPRDGQAYVRKDGEWVLLSTFL

SEQ ID NO: 81 - DNA, 1227 bp, Artificial Sequence
  Synthetic
atgttcgtcttcctcgtgctgctcccactcgtttcttcccagtgtagcttcatcgaggatctcctgtttaacaaggtgaccctggcagacgccggctttattaagcaatatggggattgcctgggcgacattgctgccagagacctgatttgcgcccagaaattcaatggcctcacagtgctgccacctctgctgaccgacgagatgatcgctcaatacactagcgcactgctggccggaaccatcacatcaggctggaccttcggggccggagcagcactgcagattccattcgccatgcagatggcctatagattcaacggcattggcgtcacacagaacgtgctgtacgaaaaccagaagctcatcgctaaccagtttaattccgcaattggaaagatccaagattcactcagctcaaccgcctctgcactcggaaagctgcaggacgtggtcaaccagaatgctcaggccctgaacacactcgtcaagcagctgtcctctaactttggcgctatcagctccgttctgaacgacattctgagccgcctggatcccccagaggctgaagtccagattgaccgcctgattaccggccggctgcagtctctgcaaacatacgtgacccagcagctgatcagagcagccgagatccgggcatccgcaaatctggcagcaactaagatgagcgaatgcgtgctgggccagtccaagcgggtggacttttgtggcaagggctaccacctgatgagcttcccccagagcgccccacatggcgttgtttttctgcacgtgacctatgtccctgctcaggaaaagaactttacaactgctcctgctatctgccatgacggcaaggcccacttcccacgggagggagtgtttgtgtccaatggcacacactggttcgtgacccagaggaacttctatgaaccccagatcatcaccactgacaataccttcgtgtctggaaattgcgacgtcgtgatcggcatcgttaacaacaccgtgtacgaccctctccagccagagctggactcctttaaggaggaactggataagtattttaagaaccacacaagcccagatgtggatctcggggacatctccggaattaacgcctccgtggtgaatatccagaaggagattgaccgcctaaatgaagttgccaagaacctcaatgagtctctgattgatctgcaggaactgggcaagtatgagcagtga

SEQ ID NO: 82 - protein, 408 aa, Artificial Sequence
  Synthetic
MFVFLVLLPLVSSQCSFIEDLLFNKVTLADAGFIKQYGDCLGDIAARDLICAQKFNGLTVLPPLLTDEMIAQYTSALLAGTITSGWTFGAGAALQIPFAMQMAYRFNGIGVTQNVLYENQKLIANQFNSAIGKIQDSLSSTASALGKLQDVVNQNAQALNTLVKQLSSNFGAISSVLNDILSRLDPPEAEVQIDRLITGRLQSLQTYVTQQLIRAAEIRASANLAATKMSECVLGQSKRVDFCGKGYHLMSFPQSAPHGVVFLHVTYVPAQEKNFTTAPAICHDGKAHFPREGVFVSNGTHWFVTQRNFYEPQIITTDNTFVSGNCDVVIGIVNNTVYDPLQPELDSFKEELDKYFKNHTSPDVDLGDISGINASVVNIQKEIDRLNEVAKNLNESLIDLQELGKYEQ

SEQ ID NO: 83 - DNA, 1308 bp, Artificial Sequence
  Synthetic
atgttcgtcttcctcgtgctgctcccactcgtttcttcccagtgtagcttcatcgaggatctcctgtttaacaaggtgaccctggcagacgccggctttattaagcaatatggggattgcctgggcgacattgctgccagagacctgatttgcgcccagaaattcaatggcctcacagtgctgccacctctgctgaccgacgagatgatcgctcaatacactagcgcactgctggccggaaccatcacatcaggctggaccttcggggccggagcagcactgcagattccattcgccatgcagatggcctatagattcaacggcattggcgtcacacagaacgtgctgtacgaaaaccagaagctcatcgctaaccagtttaattccgcaattggaaagatccaagattcactcagctcaaccgcctctgcactcggaaagctgcaggacgtggtcaaccagaatgctcaggccctgaacacactcgtcaagcagctgtcctctaactttggcgctatcagctccgttctgaacgacattctgagccgcctggatcccccagaggctgaagtccagattgaccgcctgattaccggccggctgcagtctctgcaaacatacgtgacccagcagctgatcagagcagccgagatccgggcatccgcaaatctggcagcaactaagatgagcgaatgcgtgctgggccagtccaagcgggtggacttttgtggcaagggctaccacctgatgagcttcccccagagcgccccacatggcgttgtttttctgcacgtgacctatgtccctgctcaggaaaagaactttacaactgctcctgctatctgccatgacggcaaggcccacttcccacgggagggagtgtttgtgtccaatggcacacactggttcgtgacccagaggaacttctatgaaccccagatcatcaccactgacaataccttcgtgtctggaaattgcgacgtcgtgatcggcatcgttaacaacaccgtgtacgaccctctccagccagagctggactcctttaaggaggaactggataagtattttaagaaccacacaagcccagatgtggatctcggggacatctccggaattaacgcctccgtggtgaatatccagaaggagattgaccgcctaaatgaagttgccaagaacctcaatgagtctctgattgatctgcaggaactgggcaagtatgagcaggggtacattcccgaggctcctagggacggccaggcatacgtgcgcaaagacggcgagtgggtgctgctgtccacattcctgtga

SEQ ID NO: 84 - protein, 435 aa, Artificial Sequence
  Synthetic
MFVFLVLLPLVSSQCSFIEDLLFNKVTLADAGFIKQYGDCLGDIAARDLICAQKFNGLTVLPPLLTDEMIAQYTSALLAGTITSGWTFGAGAALQIPFAMQMAYRFNGIGVTQNVLYENQKLIANQFNSAIGKIQDSLSSTASALGKLQDVVNQNAQALNTLVKQLSSNFGAISSVLNDILSRLDPPEAEVQIDRLITGRLQSLQTYVTQQLIRAAEIRASANLAATKMSECVLGQSKRVDFCGKGYHLMSFPQSAPHGVVFLHVTYVPAQEKNFTTAPAICHDGKAHFPREGVFVSNGTHWFVTQRNFYEPQIITTDNTFVSGNCDVVIGIVNNTVYDPLQPELDSFKEELDKYFKNHTSPDVDLGDISGINASVVNIQKEIDRLNEVAKNLNESLIDLQELGKYEQGYIPEAPRDGQAYVRKDGEWVLLSTFL

SEQ ID NO: 85 - DNA, 1422 bp, Artificial Sequence
  Synthetic
atgttcgtcttcctcgtgctgctcccactcgtttcttcccagtgtagcttcatcgaggatctcctgtttaacaaggtgaccctggcagacgccggctttattaagcaatatggggattgcctgggcgacattgctgccagagacctgatttgcgcccagaaattcaatggcctcacagtgctgccacctctgctgaccgacgagatgatcgctcaatacactagcgcactgctggccggaaccatcacatcaggctggaccttcggggccggagcagcactgcagattccattcgccatgcagatggcctatagattcaacggcattggcgtcacacagaacgtgctgtacgaaaaccagaagctcatcgctaaccagtttaattccgcaattggaaagatccaagattcactcagctcaaccgcctctgcactcggaaagctgcaggacgtggtcaaccagaatgctcaggccctgaacacactcgtcaagcagctgtcctctaactttggcgctatcagctccgttctgaacgacattctgagccgcctggatcccccagaggctgaagtccagattgaccgcctgattaccggccggctgcagtctctgcaaacatacgtgacccagcagctgatcagagcagccgagatccgggcatccgcaaatctggcagcaactaagatgagcgaatgcgtgctgggccagtccaagcgggtggacttttgtggcaagggctaccacctgatgagcttcccccagagcgccccacatggcgttgtttttctgcacgtgacctatgtccctgctcaggaaaagaactttacaactgctcctgctatctgccatgacggcaaggcccacttcccacgggagggagtgtttgtgtccaatggcacacactggttcgtgacccagaggaacttctatgaaccccagatcatcaccactgacaataccttcgtgtctggaaattgcgacgtcgtgatcggcatcgttaacaacaccgtgtacgaccctctccagccagagctggactcctttaaggaggaactggataagtattttaagaaccacacaagcccagatgtggatctcggggacatctccggaattaacgcctccgtggtgaatatccagaaggagattgaccgcctaaatgaagttgccaagaacctcaatgagtctctgattgatctgcaggaactgggcaagtatgagcagtatatcaaatggccctggtacatttggctggggtttatcgccggactgattgccatcgtcatggtgaccatcatgctgtgttgcatgacctcctgttgttcctgtctgaagggctgctgtagttgcggctcttgctgtaaattcgacgaagatgatagcgagcccgtgctgaagggcgtgaagctgcattatacctga

SEQ ID NO: 86 - protein, 473 aa, Artificial Sequence
  Synthetic
MFVFLVLLPLVSSQCSFIEDLLFNKVTLADAGFIKQYGDCLGDIAARDLICAQKFNGLTVLPPLLTDEMIAQYTSALLAGTITSGWTFGAGAALQIPFAMQMAYRFNGIGVTQNVLYENQKLIANQFNSAIGKIQDSLSSTASALGKLQDVVNQNAQALNTLVKQLSSNFGAISSVLNDILSRLDPPEAEVQIDRLITGRLQSLQTYVTQQLIRAAEIRASANLAATKMSECVLGQSKRVDFCGKGYHLMSFPQSAPHGVVFLHVTYVPAQEKNFTTAPAICHDGKAHFPREGVFVSNGTHWFVTQRNFYEPQIITTDNTFVSGNCDVVIGIVNNTVYDPLQPELDSFKEELDKYFKNHTSPDVDLGDISGINASVVNIQKEIDRLNEVAKNLNESLIDLQELGKYEQYIKWPWYIWLGFIAGLIAIVMVTIMLCCMTSCCSCLKGCCSCGSCCKFDEDDSEPVLKGVKLHYT

SEQ ID NO: 87 - DNA, 3822 bp, Artificial Sequence
  Synthetic
atgttcgtcttcctcgtgctgctcccactcgtttcttcccagtgtgtcaacctgacaactaggactcagctgccaccagcctacaccaactccttcaccagaggcgtgtattacccagacaaggtgtttagaagcagcgtgctgcactctacccaggacctctttctgccctttttcagcaacgtgacatggtttcacgcaattcacgtgtccggcactaatggcacaaagcggttcgacaatccagtcctgcctttcaacgatggcgtctactttgcatctactgagaaatccaatatcattaggggatggatcttcggcacaaccctggattctaagacccagagcctgctgatcgtcaacaacgccacaaacgtggtcattaaggtttgcgagtttcagttctgtaacgatccttttctgggcgtgtattatcataagaacaataagagctggatggagtccgagtttagagtgtatagctctgcaaataattgtacctttgagtacgtgagccagccctttctgatggacctggagggaaaacaaggaaacttcaaaaacctgcgggaattcgttttcaaaaacatcgacggctatttcaagatctatagcaagcataccccaatcaacctcgtgagggacctcccccagggctttagcgcactggagccactggttgacctgcctatcggcattaatatcacaagatttcagaccctgctggcactgcatagaagctatctgacccctggagactcctctagtgggtggactgccggcgccgctgcctactatgtgggctatctgcagccacggacattcctgctgaaatacaatgagaacgggacaatcacagatgctgttgattgcgcactcgaccccctgtccgagacaaagtgcactctcaagagctttaccgtcgagaagggcatctatcagacctcaaacttcagggtgcagcccacagaatctatcgtgcgcttccctaatatcactaacctgtgtcctttcggtgaagtgttcaacgccaccaggtttgctagcgtgtatgcctggaacaggaagaggatctctaactgcgtcgccgactattccgtgctgtataacagcgcctccttctccacattcaaatgctatggagtgagcccgacaaaactgaacgatctctgctttacaaatgtctacgccgactcttttgtgatcagaggggacgaggtccggcagatcgcaccaggacagacaggcaagattgctgactacaactataagctgcctgacgacttcacaggatgtgtgatcgcatggaactcaaacaatctggactccaaagtcgggggcaactataattacctgtatcgcctgttccggaagtccaacctgaagcccttcgagagggacatcagtacagagatctatcaggctggctccaccccttgcaatggcgtcgaaggctttaattgttattttcccctgcagtcttacgggtttcagcctactaatggagttgggtaccagccatacagagtggtcgtgctcagcttcgagctcctgcatgctccagctacagtttgcgggccaaagaagtccactaacctggtgaagaataagtgcgtcaacttcaactttaacgggctcaccggcaccggcgtgctgactgagagcaacaagaagtttctgccatttcaacagtttggacgggacattgccgacaccaccgatgccgttcgggatccacagaccctggaaattctggacattacaccgtgcagcttcgggggcgtgagcgtgatcacacccggaaccaatacaagcaaccaggttgccgtcctgtatcaggatgtcaattgcacagaagtgccagttgctatccacgcagaccagctgactcccacatggcgggtgtatagcaccggatccaacgtgtttcagacccgcgccggatgtctcattggggccgagcacgtgaataacagctacgagtgcgacatccccattggcgccggcatttgtgcgtcttaccagactcagaccaactctcctagaagggccaggtccgttgctagtcagtctattattgcctataccatgagcctcggagctgagaatagcgtggcctactccaataattccatcgcaatccctactaacttcactatttctgtgaccaccgagatcctgcctgtgtctatgactaagactagcgttgattgtaccatgtatatttgtggcgactctaccgaatgttctaacctgctgcttcagtacggctcattttgcacacagctgaacagagccctgactgggatcgctgtggagcaggacaagaacacacaggaggtgtttgcacaggtgaagcagatctataagacccctcctattaaggatttcggcggattcaatttctcacagattctgccagaccccagtaagccttccaagaggagcttcatcgaggatctcctgtttaacaaggtgaccctggcagacgccggctttattaagcaatatggggattgcctgggcgacattgctgccagagacctgatttgcgcccagaaattcaatggcctcacagtgctgccacctctgctgaccgacgagatgatcgctcaatacactagcgcactgctggccggaaccatcacatcaggctggaccttcggggccggagcagcactgcagattccattcgccatgcagatggcctatagattcaacggcattggcgtcacacagaacgtgctgtacgaaaaccagaagctcatcgctaaccagtttaattccgcaattggaaagatccaagattcactcagctcaaccgcctctgcactcggaaagctgcaggacgtggtcaaccagaatgctcaggccctgaacacactcgtcaagcagctgtcctctaactttggcgctatcagctccgttctgaacgacattctgagccgcctgcccaaggtggaggctgaagtccagattgaccgcctgattaccggccggctgcagtctctgcaaacatacgtgacccagcagctgatcagagcagccgagatccgggcatccgcaaatctggcagcaactaagatgagcgaatgcgtgctgggccagtccaagcgggtggacttttgtggcaagggctaccacctgatgagcttcccccagagcgccccacatggcgttgtttttctgcacgtgacctatgtccctgctcaggaaaagaactttacaactgctcctgctatctgccatgacggcaaggcccacttcccacgggagggagtgtttgtgtccaatggcacacactggttcgtgacccagaggaacttctatgaaccccagatcatcaccactgacaataccttcgtgtctggaaattgcgacgtcgtgatcggcatcgttaacaacaccgtgtacgaccctctccagccagagctggactcctttaaggaggaactggataagtattttaagaaccacacaagcccagatgtggatctcggggacatctccggaattaacgcctccgtggtgaatatccagaaggagattgaccgcctaaatgaagttgccaagaacctcaatgagtctctgattgatctgcaggaactgggcaagtatgagcagtatatcaaatggccctggtacatttggctggggtttatcgccggactgattgccatcgtcatggtgaccatcatgctgtgttgcatgacctcctgttgttcctgtctgaagggctgctgtagttgcggctcttgctgtaaattcgacgaagatgatagcgagcccgtgctgaagggcgtgaagctgcattatacctga

SEQ ID NO: 88 - protein, 1273 aa, Artificial Sequence
  Synthetic
MFVFLVLLPLVSSQCVNLTTRTQLPPAYTNSFTRGVYYPDKVFRSSVLHSTQDLFLPFFSNVTWFHAIHVSGTNGTKRFDNPVLPFNDGVYFASTEKSNIIRGWIFGTTLDSKTQSLLIVNNATNVVIKVCEFQFCNDPFLGVYYHKNNKSWMESEFRVYSSANNCTFEYVSQPFLMDLEGKQGNFKNLREFVFKNIDGYFKIYSKHTPINLVRDLPQGFSALEPLVDLPIGINITRFQTLLALHRSYLTPGDSSSGWTAGAAAYYVGYLQPRTFLLKYNENGTITDAVDCALDPLSETKCTLKSFTVEKGIYQTSNFRVQPTESIVRFPNITNLCPFGEVFNATRFASVYAWNRKRISNCVADYSVLYNSASFSTFKCYGVSPTKLNDLCFTNVYADSFVIRGDEVRQIAPGQTGKIADYNYKLPDDFTGCVIAWNSNNLDSKVGGNYNYLYRLFRKSNLKPFERDISTEIYQAGSTPCNGVEGFNCYFPLQSYGFQPTNGVGYQPYRVVVLSFELLHAPATVCGPKKSTNLVKNKCVNFNFNGLTGTGVLTESNKKFLPFQQFGRDIADTTDAVRDPQTLEILDITPCSFGGVSVITPGTNTSNQVAVLYQDVNCTEVPVAIHADQLTPTWRVYSTGSNVFQTRAGCLIGAEHVNNSYECDIPIGAGICASYQTQTNSPRRARSVASQSIIAYTMSLGAENSVAYSNNSIAIPTNFTISVTTEILPVSMTKTSVDCTMYICGDSTECSNLLLQYGSFCTQLNRALTGIAVEQDKNTQEVFAQVKQIYKTPPIKDFGGFNFSQILPDPSKPSKRSFIEDLLFNKVTLADAGFIKQYGDCLGDIAARDLICAQKFNGLTVLPPLLTDEMIAQYTSALLAGTITSGWTFGAGAALQIPFAMQMAYRFNGIGVTQNVLYENQKLIANQFNSAIGKIQDSLSSTASALGKLQDVVNQNAQALNTLVKQLSSNFGAISSVLNDILSRLPKVEAEVQIDRLITGRLQSLQTYVTQQLIRAAEIRASANLAATKMSECVLGQSKRVDFCGKGYHLMSFPQSAPHGVVFLHVTYVPAQEKNFTTAPAICHDGKAHFPREGVFVSNGTHWFVTQRNFYEPQIITTDNTFVSGNCDVVIGIVNNTVYDPLQPELDSFKEELDKYFKNHTSPDVDLGDISGINASVVNIQKEIDRLNEVAKNLNESLIDLQELGKYEQYIKWPWYIWLGFIAGLIAIVMVTIMLCCMTSCCSCLKGCCSCGSCCKFDEDDSEPVLKGVKLHYT

SEQ ID NO: 89 - DNA, 3822 bp, Artificial Sequence
  Synthetic
atgttcgtcttcctcgtgctgctcccactcgtttcttcccagtgtgtcaacctgacaactaggactcagctgccaccagcctacaccaactccttcaccagaggcgtgtattacccagacaaggtgtttagaagcagcgtgctgcactctacccaggacctctttctgccctttttcagcaacgtgacatggtttcacgcaattcacgtgtccggcactaatggcacaaagcggttcgacaatccagtcctgcctttcaacgatggcgtctactttgcatctactgagaaatccaatatcattaggggatggatcttcggcacaaccctggattctaagacccagagcctgctgatcgtcaacaacgccacaaacgtggtcattaaggtttgcgagtttcagttctgtaacgatccttttctgggcgtgtattatcataagaacaataagagctggatggagtccgagtttagagtgtatagctctgcaaataattgtacctttgagtacgtgagccagccctttctgatggacctggagggaaaacaaggaaacttcaaaaacctgcgggaattcgttttcaaaaacatcgacggctatttcaagatctatagcaagcataccccaatcaacctcgtgagggacctcccccagggctttagcgcactggagccactggttgacctgcctatcggcattaatatcacaagatttcagaccctgctggcactgcatagaagctatctgacccctggagactcctctagtgggtggactgccggcgccgctgcctactatgtgggctatctgcagccacggacattcctgctgaaatacaatgagaacgggacaatcacagatgctgttgattgcgcactcgaccccctgtccgagacaaagtgcactctcaagagctttaccgtcgagaagggcatctatcagacctcaaacttcagggtgcagcccacagaatctatcgtgcgcttccctaatatcactaacctgtgtcctttcggtgaagtgttcaacgccaccaggtttgctagcgtgtatgcctggaacaggaagaggatctctaactgcgtcgccgactattccgtgctgtataacagcgcctccttctccacattcaaatgctatggagtgagcccgacaaaactgaacgatctctgctttacaaatgtctacgccgactcttttgtgatcagaggggacgaggtccggcagatcgcaccaggacagacaggcaagattgctgactacaactataagctgcctgacgacttcacaggatgtgtgatcgcatggaactcaaacaatctggactccaaagtcgggggcaactataattacctgtatcgcctgttccggaagtccaacctgaagcccttcgagagggacatcagtacagagatctatcaggctggctccaccccttgcaatggcgtcgaaggctttaattgttattttcccctgcagtcttacgggtttcagcctactaatggagttgggtaccagccatacagagtggtcgtgctcagcttcgagctcctgcatgctccagctacagtttgcgggccaaagaagtccactaacctggtgaagaataagtgcgtcaacttcaactttaacgggctcaccggcaccggcgtgctgactgagagcaacaagaagtttctgccatttcaacagtttggacgggacattgccgacaccaccgatgccgttcgggatccacagaccctggaaattctggacattacaccgtgcagcttcgggggcgtgagcgtgatcacacccggaaccaatacaagcaaccaggttgccgtcctgtatcaggatgtcaattgcacagaagtgccagttgctatccacgcagaccagctgactcccacatggcgggtgtatagcaccggatccaacgtgtttcagacccgcgccggatgtctcattggggccgagcacgtgaataacagctacgagtgcgacatccccattggcgccggcatttgtgcgtcttaccagactcagaccaactctcctggctccgcctcttccgttgctagtcagtctattattgcctataccatgagcctcggagctgagaatagcgtggcctactccaataattccatcgcaatccctactaacttcactatttctgtgaccaccgagatcctgcctgtgtctatgactaagactagcgttgattgtaccatgtatatttgtggcgactctaccgaatgttctaacctgctgcttcagtacggctcattttgcacacagctgaacagagccctgactgggatcgctgtggagcaggacaagaacacacaggaggtgtttgcacaggtgaagcagatctataagacccctcctattaaggatttcggcggattcaatttctcacagattctgccagaccccagtaagccttccaagaggagcttcatcgaggatctcctgtttaacaaggtgaccctggcagacgccggctttattaagcaatatggggattgcctgggcgacattgctgccagagacctgatttgcgcccagaaattcaatggcctcacagtgctgccacctctgctgaccgacgagatgatcgctcaatacactagcgcactgctggccggaaccatcacatcaggctggaccttcggggccggagcagcactgcagattccattcgccatgcagatggcctatagattcaacggcattggcgtcacacagaacgtgctgtacgaaaaccagaagctcatcgctaaccagtttaattccgcaattggaaagatccaagattcactcagctcaaccgcctctgcactcggaaagctgcaggacgtggtcaaccagaatgctcaggccctgaacacactcgtcaagcagctgtcctctaactttggcgctatcagctccgttctgaacgacattctgagccgcctgcccaaggtggaggctgaagtccagattgaccgcctgattaccggccggctgcagtctctgcaaacatacgtgacccagcagctgatcagagcagccgagatccgggcatccgcaaatctggcagcaactaagatgagcgaatgcgtgctgggccagtccaagcgggtggacttttgtggcaagggctaccacctgatgagcttcccccagagcgccccacatggcgttgtttttctgcacgtgacctatgtccctgctcaggaaaagaactttacaactgctcctgctatctgccatgacggcaaggcccacttcccacgggagggagtgtttgtgtccaatggcacacactggttcgtgacccagaggaacttctatgaaccccagatcatcaccactgacaataccttcgtgtctggaaattgcgacgtcgtgatcggcatcgttaacaacaccgtgtacgaccctctccagccagagctggactcctttaaggaggaactggataagtattttaagaaccacacaagcccagatgtggatctcggggacatctccggaattaacgcctccgtggtgaatatccagaaggagattgaccgcctaaatgaagttgccaagaacctcaatgagtctctgattgatctgcaggaactgggcaagtatgagcagtatatcaaatggccctggtacatttggctggggtttatcgccggactgattgccatcgtcatggtgaccatcatgctgtgttgcatgacctcctgttgttcctgtctgaagggctgctgtagttgcggctcttgctgtaaattcgacgaagatgatagcgagcccgtgctgaagggcgtgaagctgcattatacctga

SEQ ID NO: 90 - protein, 1273 aa, Artificial Sequence
  Synthetic
MFVFLVLLPLVSSQCVNLTTRTQLPPAYTNSFTRGVYYPDKVFRSSVLHSTQDLFLPFFSNVTWFHAIHVSGTNGTKRFDNPVLPFNDGVYFASTEKSNIIRGWIFGTTLDSKTQSLLIVNNATNVVIKVCEFQFCNDPFLGVYYHKNNKSWMESEFRVYSSANNCTFEYVSQPFLMDLEGKQGNFKNLREFVFKNIDGYFKIYSKHTPINLVRDLPQGFSALEPLVDLPIGINITRFQTLLALHRSYLTPGDSSSGWTAGAAAYYVGYLQPRTFLLKYNENGTITDAVDCALDPLSETKCTLKSFTVEKGIYQTSNFRVQPTESIVRFPNITNLCPFGEVFNATRFASVYAWNRKRISNCVADYSVLYNSASFSTFKCYGVSPTKLNDLCFTNVYADSFVIRGDEVRQIAPGQTGKIADYNYKLPDDFTGCVIAWNSNNLDSKVGGNYNYLYRLFRKSNLKPFERDISTEIYQAGSTPCNGVEGFNCYFPLQSYGFQPTNGVGYQPYRVVVLSFELLHAPATVCGPKKSTNLVKNKCVNFNFNGLTGTGVLTESNKKFLPFQQFGRDIADTTDAVRDPQTLEILDITPCSFGGVSVITPGTNTSNQVAVLYQDVNCTEVPVAIHADQLTPTWRVYSTGSNVFQTRAGCLIGAEHVNNSYECDIPIGAGICASYQTQTNSPGSASSVASQSIIAYTMSLGAENSVAYSNNSIAIPTNFTISVTTEILPVSMTKTSVDCTMYICGDSTECSNLLLQYGSFCTQLNRALTGIAVEQDKNTQEVFAQVKQIYKTPPIKDFGGFNFSQILPDPSKPSKRSFIEDLLFNKVTLADAGFIKQYGDCLGDIAARDLICAQKFNGLTVLPPLLTDEMIAQYTSALLAGTITSGWTFGAGAALQIPFAMQMAYRFNGIGVTQNVLYENQKLIANQFNSAIGKIQDSLSSTASALGKLQDVVNQNAQALNTLVKQLSSNFGAISSVLNDILSRLPKVEAEVQIDRLITGRLQSLQTYVTQQLIRAAEIRASANLAATKMSECVLGQSKRVDFCGKGYHLMSFPQSAPHGVVFLHVTYVPAQEKNFTTAPAICHDGKAHFPREGVFVSNGTHWFVTQRNFYEPQIITTDNTFVSGNCDVVIGIVNNTVYDPLQPELDSFKEELDKYFKNHTSPDVDLGDISGINASVVNIQKEIDRLNEVAKNLNESLIDLQELGKYEQYIKWPWYIWLGFIAGLIAIVMVTIMLCCMTSCCSCLKGCCSCGSCCKFDEDDSEPVLKGVKLHYT

SEQ ID NO: 91 - DNA, 3822 bp, Artificial Sequence
  Synthetic
atgttcgtcttcctcgtgctgctcccactcgtttcttcccagtgtgtcaacctgacaactaggactcagctgccaccagcctacaccaactccttcaccagaggcgtgtattacccagacaaggtgtttagaagcagcgtgctgcactctacccaggacctctttctgccctttttcagcaacgtgacatggtttcacgcaattcacgtgtccggcactaatggcacaaagcggttcgacaatccagtcctgcctttcaacgatggcgtctactttgcatctactgagaaatccaatatcattaggggatggatcttcggcacaaccctggattctaagacccagagcctgctgatcgtcaacaacgccacaaacgtggtcattaaggtttgcgagtttcagttctgtaacgatccttttctgggcgtgtattatcataagaacaataagagctggatggagtccgagtttagagtgtatagctctgcaaataattgtacctttgagtacgtgagccagccctttctgatggacctggagggaaaacaaggaaacttcaaaaacctgcgggaattcgttttcaaaaacatcgacggctatttcaagatctatagcaagcataccccaatcaacctcgtgagggacctcccccagggctttagcgcactggagccactggttgacctgcctatcggcattaatatcacaagatttcagaccctgctggcactgcatagaagctatctgacccctggagactcctctagtgggtggactgccggcgccgctgcctactatgtgggctatctgcagccacggacattcctgctgaaatacaatgagaacgggacaatcacagatgctgttgattgcgcactcgaccccctgtccgagacaaagtgcactctcaagagctttaccgtcgagaagggcatctatcagacctcaaacttcagggtgcagcccacagaatctatcgtgcgcttccctaatatcactaacctgtgtcctttcggtgaagtgttcaacgccaccaggtttgctagcgtgtatgcctggaacaggaagaggatctctaactgcgtcgccgactattccgtgctgtataacagcgcctccttctccacattcaaatgctatggagtgagcccgacaaaactgaacgatctctgctttacaaatgtctacgccgactcttttgtgatcagaggggacgaggtccggcagatcgcaccaggacagacaggcaagattgctgactacaactataagctgcctgacgacttcacaggatgtgtgatcgcatggaactcaaacaatctggactccaaagtcgggggcaactataattacctgtatcgcctgttccggaagtccaacctgaagcccttcgagagggacatcagtacagagatctatcaggctggctccaccccttgcaatggcgtcgaaggctttaattgttattttcccctgcagtcttacgggtttcagcctactaatggagttgggtaccagccatacagagtggtcgtgctcagcttcgagctcctgcatgctccagctacagtttgcgggccaaagaagtccactaacctggtgaagaataagtgcgtcaacttcaactttaacgggctcaccggcaccggcgtgctgactgagagcaacaagaagtttctgccatttcaacagtttggacgggacattgccgacaccaccgatgccgttcgggatccacagaccctggaaattctggacattacaccgtgcagcttcgggggcgtgagcgtgatcacacccggaaccaatacaagcaaccaggttgccgtcctgtatcaggatgtcaattgcacagaagtgccagttgctatccacgcagaccagctgactcccacatggcgggtgtatagcaccggatccaacgtgtttcagacccgcgccggatgtctcattggggccgagcacgtgaataacagctacgagtgcgacatccccattggcgccggcatttgtgcgtcttaccagactcagaccaactctcctagaagggccaggtccgttgctagtcagtctattattgcctataccatgagcctcggagctgagaatagcgtggcctactccaataattccatcgcaatccctactaacttcactatttctgtgaccaccgagatcctgcctgtgtctatgactaagactagcgttgattgtaccatgtatatttgtggcgactctaccgaatgttctaacctgctgcttcagtacggctcattttgcacacagctgaacagagccctgactgggatcgctgtggagcaggacaagaacacacaggaggtgtttgcacaggtgaagcagatctataagacccctcctattaaggatttcggcggattcaatttctcacagattctgccagaccccagtaagccttccaagaggagcttcatcgaggatctcctgtttaacaaggtgaccctggcagacgccggctttattaagcaatatggggattgcctgggcgacattgctgccagagacctgatttgcgcccagaaattcaatggcctcacagtgctgccacctctgctgaccgacgagatgatcgctcaatacactagcgcactgctggccggaaccatcacatcaggctggaccttcggggccggagcagcactgcagattccattcgccatgcagatggcctatagattcaacggcattggcgtcacacagaacgtgctgtacgaaaaccagaagctcatcgctaaccagtttaattccgcaattggaaagatccaagattcactcagctcaaccgcctctgcactcggaaagctgcaggacgtggtcaaccagaatgctcaggccctgaacacactcgtcaagcagctgtcctctaactttggcgctatcagctccgttctgaacgacattctgagccgcctgcctccacccgaggctgaagtccagattgaccgcctgattaccggccggctgcagtctctgcaaacatacgtgacccagcagctgatcagagcagccgagatccgggcatccgcaaatctggcagcaactaagatgagcgaatgcgtgctgggccagtccaagcgggtggacttttgtggcaagggctaccacctgatgagcttcccccagagcgccccacatggcgttgtttttctgcacgtgacctatgtccctgctcaggaaaagaactttacaactgctcctgctatctgccatgacggcaaggcccacttcccacgggagggagtgtttgtgtccaatggcacacactggttcgtgacccagaggaacttctatgaaccccagatcatcaccactgacaataccttcgtgtctggaaattgcgacgtcgtgatcggcatcgttaacaacaccgtgtacgaccctctccagccagagctggactcctttaaggaggaactggataagtattttaagaaccacacaagcccagatgtggatctcggggacatctccggaattaacgcctccgtggtgaatatccagaaggagattgaccgcctaaatgaagttgccaagaacctcaatgagtctctgattgatctgcaggaactgggcaagtatgagcagtatatcaaatggccctggtacatttggctggggtttatcgccggactgattgccatcgtcatggtgaccatcatgctgtgttgcatgacctcctgttgttcctgtctgaagggctgctgtagttgcggctcttgctgtaaattcgacgaagatgatagcgagcccgtgctgaagggcgtgaagctgcattatacctga

SEQ ID NO: 92 - protein, 1273 aa, Artificial Sequence
  Synthetic
MFVFLVLLPLVSSQCVNLTTRTQLPPAYTNSFTRGVYYPDKVFRSSVLHSTQDLFLPFFSNVTWFHAIHVSGTNGTKRFDNPVLPFNDGVYFASTEKSNIIRGWIFGTTLDSKTQSLLIVNNATNVVIKVCEFQFCNDPFLGVYYHKNNKSWMESEFRVYSSANNCTFEYVSQPFLMDLEGKQGNFKNLREFVFKNIDGYFKIYSKHTPINLVRDLPQGFSALEPLVDLPIGINITRFQTLLALHRSYLTPGDSSSGWTAGAAAYYVGYLQPRTFLLKYNENGTITDAVDCALDPLSETKCTLKSFTVEKGIYQTSNFRVQPTESIVRFPNITNLCPFGEVFNATRFASVYAWNRKRISNCVADYSVLYNSASFSTFKCYGVSPTKLNDLCFTNVYADSFVIRGDEVRQIAPGQTGKIADYNYKLPDDFTGCVIAWNSNNLDSKVGGNYNYLYRLFRKSNLKPFERDISTEIYQAGSTPCNGVEGFNCYFPLQSYGFQPTNGVGYQPYRVVVLSFELLHAPATVCGPKKSTNLVKNKCVNFNFNGLTGTGVLTESNKKFLPFQQFGRDIADTTDAVRDPQTLEILDITPCSFGGVSVITPGTNTSNQVAVLYQDVNCTEVPVAIHADQLTPTWRVYSTGSNVFQTRAGCLIGAEHVNNSYECDIPIGAGICASYQTQTNSPRRARSVASQSIIAYTMSLGAENSVAYSNNSIAIPTNFTISVTTEILPVSMTKTSVDCTMYICGDSTECSNLLLQYGSFCTQLNRALTGIAVEQDKNTQEVFAQVKQIYKTPPIKDFGGFNFSQILPDPSKPSKRSFIEDLLFNKVTLADAGFIKQYGDCLGDIAARDLICAQKFNGLTVLPPLLTDEMIAQYTSALLAGTITSGWTFGAGAALQIPFAMQMAYRFNGIGVTQNVLYENQKLIANQFNSAIGKIQDSLSSTASALGKLQDVVNQNAQALNTLVKQLSSNFGAISSVLNDILSRLPPPEAEVQIDRLITGRLQSLQTYVTQQLIRAAEIRASANLAATKMSECVLGQSKRVDFCGKGYHLMSFPQSAPHGVVFLHVTYVPAQEKNFTTAPAICHDGKAHFPREGVFVSNGTHWFVTQRNFYEPQIITTDNTFVSGNCDVVIGIVNNTVYDPLQPELDSFKEELDKYFKNHTSPDVDLGDISGINASVVNIQKEIDRLNEVAKNLNESLIDLQELGKYEQYIKWPWYIWLGFIAGLIAIVMVTIMLCCMTSCCSCLKGCCSCGSCCKFDEDDSEPVLKGVKLHYT

SEQ ID NO: 93 - DNA, 3822 bp, Artificial Sequence
  Synthetic
atgttcgtcttcctcgtgctgctcccactcgtttcttcccagtgtgtcaacctgacaactaggactcagctgccaccagcctacaccaactccttcaccagaggcgtgtattacccagacaaggtgtttagaagcagcgtgctgcactctacccaggacctctttctgccctttttcagcaacgtgacatggtttcacgcaattcacgtgtccggcactaatggcacaaagcggttcgacaatccagtcctgcctttcaacgatggcgtctactttgcatctactgagaaatccaatatcattaggggatggatcttcggcacaaccctggattctaagacccagagcctgctgatcgtcaacaacgccacaaacgtggtcattaaggtttgcgagtttcagttctgtaacgatccttttctgggcgtgtattatcataagaacaataagagctggatggagtccgagtttagagtgtatagctctgcaaataattgtacctttgagtacgtgagccagccctttctgatggacctggagggaaaacaaggaaacttcaaaaacctgcgggaattcgttttcaaaaacatcgacggctatttcaagatctatagcaagcataccccaatcaacctcgtgagggacctcccccagggctttagcgcactggagccactggttgacctgcctatcggcattaatatcacaagatttcagaccctgctggcactgcatagaagctatctgacccctggagactcctctagtgggtggactgccggcgccgctgcctactatgtgggctatctgcagccacggacattcctgctgaaatacaatgagaacgggacaatcacagatgctgttgattgcgcactcgaccccctgtccgagacaaagtgcactctcaagagctttaccgtcgagaagggcatctatcagacctcaaacttcagggtgcagcccacagaatctatcgtgcgcttccctaatatcactaacctgtgtcctttcggtgaagtgttcaacgccaccaggtttgctagcgtgtatgcctggaacaggaagaggatctctaactgcgtcgccgactattccgtgctgtataacagcgcctccttctccacattcaaatgctatggagtgagcccgacaaaactgaacgatctctgctttacaaatgtctacgccgactcttttgtgatcagaggggacgaggtccggcagatcgcaccaggacagacaggcaagattgctgactacaactataagctgcctgacgacttcacaggatgtgtgatcgcatggaactcaaacaatctggactccaaagtcgggggcaactataattacctgtatcgcctgttccggaagtccaacctgaagcccttcgagagggacatcagtacagagatctatcaggctggctccaccccttgcaatggcgtcgaaggctttaattgttattttcccctgcagtcttacgggtttcagcctactaatggagttgggtaccagccatacagagtggtcgtgctcagcttcgagctcctgcatgctccagctacagtttgcgggccaaagaagtccactaacctggtgaagaataagtgcgtcaacttcaactttaacgggctcaccggcaccggcgtgctgactgagagcaacaagaagtttctgccatttcaacagtttggacgggacattgccgacaccaccgatgccgttcgggatccacagaccctggaaattctggacattacaccgtgcagcttcgggggcgtgagcgtgatcacacccggaaccaatacaagcaaccaggttgccgtcctgtatcaggatgtcaattgcacagaagtgccagttgctatccacgcagaccagctgactcccacatggcgggtgtatagcaccggatccaacgtgtttcagacccgcgccggatgtctcattggggccgagcacgtgaataacagctacgagtgcgacatccccattggcgccggcatttgtgcgtcttaccagactcagaccaactctcctggctccgcctcttccgttgctagtcagtctattattgcctataccatgagcctcggagctgagaatagcgtggcctactccaataattccatcgcaatccctactaacttcactatttctgtgaccaccgagatcctgcctgtgtctatgactaagactagcgttgattgtaccatgtatatttgtggcgactctaccgaatgttctaacctgctgcttcagtacggctcattttgcacacagctgaacagagccctgactgggatcgctgtggagcaggacaagaacacacaggaggtgtttgcacaggtgaagcagatctataagacccctcctattaaggatttcggcggattcaatttctcacagattctgccagaccccagtaagccttccaagaggagcttcatcgaggatctcctgtttaacaaggtgaccctggcagacgccggctttattaagcaatatggggattgcctgggcgacattgctgccagagacctgatttgcgcccagaaattcaatggcctcacagtgctgccacctctgctgaccgacgagatgatcgctcaatacactagcgcactgctggccggaaccatcacatcaggctggaccttcggggccggagcagcactgcagattccattcgccatgcagatggcctatagattcaacggcattggcgtcacacagaacgtgctgtacgaaaaccagaagctcatcgctaaccagtttaattccgcaattggaaagatccaagattcactcagctcaaccgcctctgcactcggaaagctgcaggacgtggtcaaccagaatgctcaggccctgaacacactcgtcaagcagctgtcctctaactttggcgctatcagctccgttctgaacgacattctgagccgcctgcctccacccgaggctgaagtccagattgaccgcctgattaccggccggctgcagtctctgcaaacatacgtgacccagcagctgatcagagcagccgagatccgggcatccgcaaatctggcagcaactaagatgagcgaatgcgtgctgggccagtccaagcgggtggacttttgtggcaagggctaccacctgatgagcttcccccagagcgccccacatggcgttgtttttctgcacgtgacctatgtccctgctcaggaaaagaactttacaactgctcctgctatctgccatgacggcaaggcccacttcccacgggagggagtgtttgtgtccaatggcacacactggttcgtgacccagaggaacttctatgaaccccagatcatcaccactgacaataccttcgtgtctggaaattgcgacgtcgtgatcggcatcgttaacaacaccgtgtacgaccctctccagccagagctggactcctttaaggaggaactggataagtattttaagaaccacacaagcccagatgtggatctcggggacatctccggaattaacgcctccgtggtgaatatccagaaggagattgaccgcctaaatgaagttgccaagaacctcaatgagtctctgattgatctgcaggaactgggcaagtatgagcagtatatcaaatggccctggtacatttggctggggtttatcgccggactgattgccatcgtcatggtgaccatcatgctgtgttgcatgacctcctgttgttcctgtctgaagggctgctgtagttgcggctcttgctgtaaattcgacgaagatgatagcgagcccgtgctgaagggcgtgaagctgcattatacctga

SEQ ID NO: 94 - protein, 1273 aa, Artificial Sequence
  Synthetic
MFVFLVLLPLVSSQCVNLTTRTQLPPAYTNSFTRGVYYPDKVFRSSVLHSTQDLFLPFFSNVTWFHAIHVSGTNGTKRFDNPVLPFNDGVYFASTEKSNIIRGWIFGTTLDSKTQSLLIVNNATNVVIKVCEFQFCNDPFLGVYYHKNNKSWMESEFRVYSSANNCTFEYVSQPFLMDLEGKQGNFKNLREFVFKNIDGYFKIYSKHTPINLVRDLPQGFSALEPLVDLPIGINITRFQTLLALHRSYLTPGDSSSGWTAGAAAYYVGYLQPRTFLLKYNENGTITDAVDCALDPLSETKCTLKSFTVEKGIYQTSNFRVQPTESIVRFPNITNLCPFGEVFNATRFASVYAWNRKRISNCVADYSVLYNSASFSTFKCYGVSPTKLNDLCFTNVYADSFVIRGDEVRQIAPGQTGKIADYNYKLPDDFTGCVIAWNSNNLDSKVGGNYNYLYRLFRKSNLKPFERDISTEIYQAGSTPCNGVEGFNCYFPLQSYGFQPTNGVGYQPYRVVVLSFELLHAPATVCGPKKSTNLVKNKCVNFNFNGLTGTGVLTESNKKFLPFQQFGRDIADTTDAVRDPQTLEILDITPCSFGGVSVITPGTNTSNQVAVLYQDVNCTEVPVAIHADQLTPTWRVYSTGSNVFQTRAGCLIGAEHVNNSYECDIPIGAGICASYQTQTNSPGSASSVASQSIIAYTMSLGAENSVAYSNNSIAIPTNFTISVTTEILPVSMTKTSVDCTMYICGDSTECSNLLLQYGSFCTQLNRALTGIAVEQDKNTQEVFAQVKQIYKTPPIKDFGGFNFSQILPDPSKPSKRSFIEDLLFNKVTLADAGFIKQYGDCLGDIAARDLICAQKFNGLTVLPPLLTDEMIAQYTSALLAGTITSGWTFGAGAALQIPFAMQMAYRFNGIGVTQNVLYENQKLIANQFNSAIGKIQDSLSSTASALGKLQDVVNQNAQALNTLVKQLSSNFGAISSVLNDILSRLPPPEAEVQIDRLITGRLQSLQTYVTQQLIRAAEIRASANLAATKMSECVLGQSKRVDFCGKGYHLMSFPQSAPHGVVFLHVTYVPAQEKNFTTAPAICHDGKAHFPREGVFVSNGTHWFVTQRNFYEPQIITTDNTFVSGNCDVVIGIVNNTVYDPLQPELDSFKEELDKYFKNHTSPDVDLGDISGINASVVNIQKEIDRLNEVAKNLNESLIDLQELGKYEQYIKWPWYIWLGFIAGLIAIVMVTIMLCCMTSCCSCLKGCCSCGSCCKFDEDDSEPVLKGVKLHYT

SEQ ID NO: 95 - DNA, 1422 bp, Artificial Sequence
  Synthetic
atgttcgtcttcctcgtgctgctcccactcgtttcttcccagtgtagcttcatcgaggatctcctgtttaacaaggtgaccctggcagacgccggctttattaagcaatatggggattgcctgggcgacattgctgccagagacctgatttgcgcccagaaattcaatggcctcacagtgctgccacctctgctgaccgacgagatgatcgctcaatacactagcgcactgctggccggaaccatcacatcaggctggaccttcggggccggagcagcactgcagattccattcgccatgcagatggcctatagattcaacggcattggcgtcacacagaacgtgctgtacgaaaaccagaagctcatcgctaaccagtttaattccgcaattggaaagatccaagattcactcagctcaaccgcctctgcactcggaaagctgcaggacgtggtcaaccagaatgctcaggccctgaacacactcgtcaagcagctgtcctctaactttggcgctatcagctccgttctgaacgacattctgagccgcctggataaggtggaggctgaagtccagattgaccgcctgattaccggccggctgcagtctctgcaaacatacgtgacccagcagctgatcagagcagccgagatccgggcatccgcaaatctggcagcaactaagatgagcgaatgcgtgctgggccagtccaagcgggtggacttttgtggcaagggctaccacctgatgagcttcccccagagcgccccacatggcgttgtttttctgcacgtgacctatgtccctgctcaggaaaagaactttacaactgctcctgctatctgccatgacggcaaggcccacttcccacgggagggagtgtttgtgtccaatggcacacactggttcgtgacccagaggaacttctatgaaccccagatcatcaccactgacaataccttcgtgtctggaaattgcgacgtcgtgatcggcatcgttaacaacaccgtgtacgaccctctccagccagagctggactcctttaaggaggaactggataagtattttaagaaccacacaagcccagatgtggatctcggggacatctccggaattaacgcctccgtggtgaatatccagaaggagattgaccgcctaaatgaagttgccaagaacctcaatgagtctctgattgatctgcaggaactgggcaagtatgagcagtatatcaaatggccctggtacatttggctggggtttatcgccggactgattgccatcgtcatggtgaccatcatgctgtgttgcatgacctcctgttgttcctgtctgaagggctgctgtagttgcggctcttgctgtaaattcgacgaagatgatagcgagcccgtgctgaagggcgtgaagctgcattatacctga

SEQ ID NO: 96 - protein, 473 aa, Artificial Sequence
  Synthetic
MFVFLVLLPLVSSQCSFIEDLLFNKVTLADAGFIKQYGDCLGDIAARDLICAQKFNGLTVLPPLLTDEMIAQYTSALLAGTITSGWTFGAGAALQIPFAMQMAYRFNGIGVTQNVLYENQKLIANQFNSAIGKIQDSLSSTASALGKLQDVVNQNAQALNTLVKQLSSNFGAISSVLNDILSRLDKVEAEVQIDRLITGRLQSLQTYVTQQLIRAAEIRASANLAATKMSECVLGQSKRVDFCGKGYHLMSFPQSAPHGVVFLHVTYVPAQEKNFTTAPAICHDGKAHFPREGVFVSNGTHWFVTQRNFYEPQIITTDNTFVSGNCDVVIGIVNNTVYDPLQPELDSFKEELDKYFKNHTSPDVDLGDISGINASVVNIQKEIDRLNEVAKNLNESLIDLQELGKYEQYIKWPWYIWLGFIAGLIAIVMVTIMLCCMTSCCSCLKGCCSCGSCCKFDEDDSEPVLKGVKLHYT

SEQ ID NO: 97 - DNA, 1380 bp, Artificial Sequence
  Synthetic
atgagcttcatcgaggatctcctgtttaacaaggtgaccctggcagacgccggctttattaagcaatatggggattgcctgggcgacattgctgccagagacctgatttgcgcccagaaattcaatggcctcacagtgctgccacctctgctgaccgacgagatgatcgctcaatacactagcgcactgctggccggaaccatcacatcaggctggaccttcggggccggagcagcactgcagattccattcgccatgcagatggcctatagattcaacggcattggcgtcacacagaacgtgctgtacgaaaaccagaagctcatcgctaaccagtttaattccgcaattggaaagatccaagattcactcagctcaaccgcctctgcactcggaaagctgcaggacgtggtcaaccagaatgctcaggccctgaacacactcgtcaagcagctgtcctctaactttggcgctatcagctccgttctgaacgacattctgagccgcctggataaggtggaggctgaagtccagattgaccgcctgattaccggccggctgcagtctctgcaaacatacgtgacccagcagctgatcagagcagccgagatccgggcatccgcaaatctggcagcaactaagatgagcgaatgcgtgctgggccagtccaagcgggtggacttttgtggcaagggctaccacctgatgagcttcccccagagcgccccacatggcgttgtttttctgcacgtgacctatgtccctgctcaggaaaagaactttacaactgctcctgctatctgccatgacggcaaggcccacttcccacgggagggagtgtttgtgtccaatggcacacactggttcgtgacccagaggaacttctatgaaccccagatcatcaccactgacaataccttcgtgtctggaaattgcgacgtcgtgatcggcatcgttaacaacaccgtgtacgaccctctccagccagagctggactcctttaaggaggaactggataagtattttaagaaccacacaagcccagatgtggatctcggggacatctccggaattaacgcctccgtggtgaatatccagaaggagattgaccgcctaaatgaagttgccaagaacctcaatgagtctctgattgatctgcaggaactgggcaagtatgagcagtatatcaaatggccctggtacatttggctggggtttatcgccggactgattgccatcgtcatggtgaccatcatgctgtgttgcatgacctcctgttgttcctgtctgaagggctgctgtagttgcggctcttgctgtaaattcgacgaagatgatagcgagcccgtgctgaagggcgtgaagctgcattatacctga

SEQ ID NO: 98 - protein, 459 aa, SARS-CoV-2
MSFIEDLLFNKVTLADAGFIKQYGDCLGDIAARDLICAQKFNGLTVLPPLLTDEMIAQYTSALLAGTITSGWTFGAGAALQIPFAMQMAYRFNGIGVTQNVLYENQKLIANQFNSAIGKIQDSLSSTASALGKLQDVVNQNAQALNTLVKQLSSNFGAISSVLNDILSRLDKVEAEVQIDRLITGRLQSLQTYVTQQLIRAAEIRASANLAATKMSECVLGQSKRVDFCGKGYHLMSFPQSAPHGVVFLHVTYVPAQEKNFTTAPAICHDGKAHFPREGVFVSNGTHWFVTQRNFYEPQIITTDNTFVSGNCDVVIGIVNNTVYDPLQPELDSFKEELDKYFKNHTSPDVDLGDISGINASVVNIQKEIDRLNEVAKNLNESLIDLQELGKYEQYIKWPWYIWLGFIAGLIAIVMVTIMLCCMTSCCSCLKGCCSCGSCCKFDEDDSEPVLKGVKLHYT

SEQ ID NO: 99 - protein, 31 aa, Artificial Sequence
  Synthetic
SFIEDLLFNKVTLADAGFIKQYGDCLGDIAA

SEQ ID NO: 100 - protein, 231 aa, Artificial Sequence
  Synthetic
PKSCDKTHTCPPCPAPELLGGPSVFLFPPKPKDTLMISRTPEVTCVVVDVSHEDPEVKFNWYVDGVEVHNAKTKPREEQYNSTYRVVSVLTVDHHDWLNGKEYKCKVSNKALPAPIEKTISKAKGQPREPQVYTLPPSRDELTKNQVSLTCLVKGFYPSDIAVEWESNGQPENNYKTTPPVLDSDGSFFLYSKLTVDKSRWQQGNVFSCSVMHEALHSHYTQKSLSLSPGK

SEQ ID NO: 101 - protein, 231 aa, Artificial Sequence
  Synthetic
PKSCDKTHTCPPCPAPELLGGPSVFLFPPKPKDTLMISRTPEVTCVVVDVSHEDPEVKFNWYVDGVEVHNAKTKPREEQYNSTYRVVSVLTVLHQDWLNGKEYKCKVSNKALPAPIEKTISKAKGQPREPQVYTLPPSRDELTKNQVSLTCLVKGFYPSDIAVEWESNGQPENNYKTTPPVLDSDGSFFLYSKLTVDKSRWQQGNVFSCSVLHEALHSHYTQKSLSLSPGK

SEQ ID NO: 102 - protein, 231 aa, Artificial Sequence
  Synthetic
PKSCDKTHTCPPCPAPELLGGPSVFLFPPKPKDTLYITREPEVTCVVVDVSHEDPEVKFNWYVDGVEVHNAKTKPREEQYNSTYRVVSVLTVLHQDWLNGKEYKCKVSNKALPAPIEKTISKAKGQPREPQVYTLPPSRDELTKNQVSLTCLVKGFYPSDIAVEWESNGQPENNYKTTPPVLDSDGSFFLYSKLTVDKSRWQQGNVFSCSVMHEALHNHYTQKSLSLSPGK

SEQ ID NO: 103 - protein, 231 aa, Artificial Sequence
  Synthetic
PKSCDKTHTCPPCPAPELLGGPSVFLFPPKPKDTLMISRTPEVTCVVVDVSHEDPEVKFNWYVDGVEVHNAKTKPREEQYNSTYRVVSVLTVLHQDWLNGKEYKCKVSNKALPAPIEKTISKAKGQPREPQVYTLPPSRDELTKNQVSLTCLVKGFYPSDIAVEWESNGQPENNYKTTPPVLDSDGSFFLYSKLTVDKSRWQQGNVFSCSVMHEALKFHYTQKSLSLSPGK

SEQ ID NO: 104 - protein, 438 aa, Artificial Sequence
  Synthetic
MFVFLVLLPLVSSQCPNITNLCPFGEVFNATRFASVYAWNRKRISNCVADYSVLYNSASFSTFKCYGVSPTKLNDLCFTNVYADSFVIRGDEVRQIAPGQTGKIADYNYKLPDDFTGCVIAWNSNNLDSKVGGNYNYLYRLFRKSNLKPFERDISTEIYQAGSTPCNGVEGFNCYFPLQSYGFQPTNGVGYQPYRVVVLSFELLHAPPKSCDKTHTCPPCPAPELLGGPSVFLFPPKPKDTLMISRTPEVTCVVVDVSHEDPEVKFNWYVDGVEVHNAKTKPREEQYNSTYRVVSVLTVDHHDWLNGKEYKCKVSNKALPAPIEKTISKAKGQPREPQVYTLPPSRDELTKNQVSLTCLVKGFYPSDIAVEWESNGQPENNYKTTPPVLDSDGSFFLYSKLTVDKSRWQQGNVFSCSVMHEALHSHYTQKSLSLSPGK

SEQ ID NO: 105 - DNA, 1317 bp, Artificial Sequence
  Synthetic
atgttcgtcttcctcgtgctgctcccactcgtttcttcccagtgtcctaatatcactaacctgtgtcctttcggtgaagtgttcaacgccaccaggtttgctagcgtgtatgcctggaacaggaagaggatctctaactgcgtcgccgactattccgtgctgtataacagcgcctccttctccacattcaaatgctatggagtgagcccgacaaaactgaacgatctctgctttacaaatgtctacgccgactcttttgtgatcagaggggacgaggtccggcagatcgcaccaggacagacaggcaagattgctgactacaactataagctgcctgacgacttcacaggatgtgtgatcgcatggaactcaaacaatctggactccaaagtcgggggcaactataattacctgtatcgcctgttccggaagtccaacctgaagcccttcgagagggacatcagtacagagatctatcaggctggctccaccccttgcaatggcgtcgaaggctttaattgttattttcccctgcagtcttacgggtttcagcctactaatggagttgggtaccagccatacagagtggtcgtgctcagcttcgagctcctgcatgctccacctaagtcctgcgacaaaacccatacatgtccaccatgcccagctcctgaactgctcggcgggcctagtgttttcctcttccctcctaagcccaaggataccctcatgatctctcgcacaccagaagtgacctgcgtggtcgtggatgtctctcacgaggatcctgaagtgaagtttaactggtatgtcgacggagtggaagtgcacaacgccaagacaaagccaagagaagaacaatacaattctacttatagggtggtgtctgtgctgacagtggatcaccatgattggctgaatggaaaagaatataagtgtaaggtctctaacaaggccctgcccgctccaattgagaagacaatttccaaggccaaggggcagcctcgggaacctcaggtgtacacactgcccccatccagggatgaactgactaaaaatcaggtgtctctgacatgcctggtgaaagggttttatccaagtgacattgctgtggagtgggagtctaatgggcagcctgaaaataactacaagaccacaccaccagtgctcgatagcgacgggtctttctttctgtattctaaactgaccgtggataaatctcggtggcagcagggaaacgtgttttcttgctcagtgatgcacgaagctctgcactctcactatacacagaaatccctgtccctgtctccaggcaaataa

SEQ ID NO: 106 - protein, 438 aa, Artificial Sequence
  Synthetic
MFVFLVLLPLVSSQCPNITNLCPFGEVFNATRFASVYAWNRKRISNCVADYSVLYNSASFSTFKCYGVSPTKLNDLCFTNVYADSFVIRGDEVRQIAPGQTGKIADYNYKLPDDFTGCVIAWNSNNLDSKVGGNYNYLYRLFRKSNLKPFERDISTEIYQAGSTPCNGVEGFNCYFPLQSYGFQPTNGVGYQPYRVVVLSFELLHAPPKSCDKTHTCPPCPAPELLGGPSVFLFPPKPKDTLMISRTPEVTCVVVDVSHEDPEVKFNWYVDGVEVHNAKTKPREEQYNSTYRVVSVLTVLHQDWLNGKEYKCKVSNKALPAPIEKTISKAKGQPREPQVYTLPPSRDELTKNQVSLTCLVKGFYPSDIAVEWESNGQPENNYKTTPPVLDSDGSFFLYSKLTVDKSRWQQGNVFSCSVLHEALHSHYTQKSLSLSPGK

SEQ ID NO: 107 - DNA, 1317 bp, Artificial Sequence
  Synthetic
atgttcgtcttcctcgtgctgctcccactcgtttcttcccagtgtcctaatatcactaacctgtgtcctttcggtgaagtgttcaacgccaccaggtttgctagcgtgtatgcctggaacaggaagaggatctctaactgcgtcgccgactattccgtgctgtataacagcgcctccttctccacattcaaatgctatggagtgagcccgacaaaactgaacgatctctgctttacaaatgtctacgccgactcttttgtgatcagaggggacgaggtccggcagatcgcaccaggacagacaggcaagattgctgactacaactataagctgcctgacgacttcacaggatgtgtgatcgcatggaactcaaacaatctggactccaaagtcgggggcaactataattacctgtatcgcctgttccggaagtccaacctgaagcccttcgagagggacatcagtacagagatctatcaggctggctccaccccttgcaatggcgtcgaaggctttaattgttattttcccctgcagtcttacgggtttcagcctactaatggagttgggtaccagccatacagagtggtcgtgctcagcttcgagctcctgcatgctccacctaagtcctgcgacaaaacccatacatgtccaccatgcccagctcctgaactgctcggcgggcctagtgttttcctcttccctcctaagcccaaggataccctcatgatctctcgcacaccagaagtgacctgcgtggtcgtggatgtctctcacgaggatcctgaagtgaagtttaactggtatgtcgacggagtggaagtgcacaacgccaagacaaagccaagagaagaacaatacaattctacttatagggtggtgtctgtgctgacagtgctgcaccaggattggctgaatggaaaagaatataagtgtaaggtctctaacaaggccctgcccgctccaattgagaagacaatttccaaggccaaggggcagcctcgggaacctcaggtgtacacactgcccccatccagggatgaactgactaaaaatcaggtgtctctgacatgcctggtgaaagggttttatccaagtgacattgctgtggagtgggagtctaatgggcagcctgaaaataactacaagaccacaccaccagtgctcgatagcgacgggtctttctttctgtattctaaactgaccgtggataaatctcggtggcagcagggaaacgtgttttcttgctcagtgttacacgaagctctgcactctcactatacacagaaatccctgtccctgtctccaggcaaataa

SEQ ID NO: 108 - protein, 438 aa, Artificial Sequence
  Synthetic
MFVFLVLLPLVSSQCPNITNLCPFGEVFNATRFASVYAWNRKRISNCVADYSVLYNSASFSTFKCYGVSPTKLNDLCFTNVYADSFVIRGDEVRQIAPGQTGKIADYNYKLPDDFTGCVIAWNSNNLDSKVGGNYNYLYRLFRKSNLKPFERDISTEIYQAGSTPCNGVEGFNCYFPLQSYGFQPTNGVGYQPYRVVVLSFELLHAPPKSCDKTHTCPPCPAPELLGGPSVFLFPPKPKDTLYITREPEVTCVVVDVSHEDPEVKFNWYVDGVEVHNAKTKPREEQYNSTYRVVSVLTVLHQDWLNGKEYKCKVSNKALPAPIEKTISKAKGQPREPQVYTLPPSRDELTKNQVSLTCLVKGFYPSDIAVEWESNGQPENNYKTTPPVLDSDGSFFLYSKLTVDKSRWQQGNVFSCSVMHEALHNHYTQKSLSLSPGK

SEQ ID NO: 109 - DNA, 1317 bp, Artificial Sequence
  Synthetic
atgttcgtcttcctcgtgctgctcccactcgtttcttcccagtgtcctaatatcactaacctgtgtcctttcggtgaagtgttcaacgccaccaggtttgctagcgtgtatgcctggaacaggaagaggatctctaactgcgtcgccgactattccgtgctgtataacagcgcctccttctccacattcaaatgctatggagtgagcccgacaaaactgaacgatctctgctttacaaatgtctacgccgactcttttgtgatcagaggggacgaggtccggcagatcgcaccaggacagacaggcaagattgctgactacaactataagctgcctgacgacttcacaggatgtgtgatcgcatggaactcaaacaatctggactccaaagtcgggggcaactataattacctgtatcgcctgttccggaagtccaacctgaagcccttcgagagggacatcagtacagagatctatcaggctggctccaccccttgcaatggcgtcgaaggctttaattgttattttcccctgcagtcttacgggtttcagcctactaatggagttgggtaccagccatacagagtggtcgtgctcagcttcgagctcctgcatgctccacctaagtcctgcgacaaaacccatacatgtccaccatgcccagctcctgaactgctcggcgggcctagtgttttcctcttccctcctaagcccaaggataccctctatatcactcgcgaaccagaagtgacctgcgtggtcgtggatgtctctcacgaggatcctgaagtgaagtttaactggtatgtcgacggagtggaagtgcacaacgccaagacaaagccaagagaagaacaatacaattctacttatagggtggtgtctgtgctgacagtgctgcaccaggattggctgaatggaaaagaatataagtgtaaggtctctaacaaggccctgcccgctccaattgagaagacaatttccaaggccaaggggcagcctcgggaacctcaggtgtacacactgcccccatccagggatgaactgactaaaaatcaggtgtctctgacatgcctggtgaaagggttttatccaagtgacattgctgtggagtgggagtctaatgggcagcctgaaaataactacaagaccacaccaccagtgctcgatagcgacgggtctttctttctgtattctaaactgaccgtggataaatctcggtggcagcagggaaacgtgttttcttgctcagtgatgcacgaagctctgcacaatcactatacacagaaatccctgtccctgtctccaggcaaataa

SEQ ID NO: 110 - protein, 438 aa, Artificial Sequence
  Synthetic
MFVFLVLLPLVSSQCPNITNLCPFGEVFNATRFASVYAWNRKRISNCVADYSVLYNSASFSTFKCYGVSPTKLNDLCFTNVYADSFVIRGDEVRQIAPGQTGKIADYNYKLPDDFTGCVIAWNSNNLDSKVGGNYNYLYRLFRKSNLKPFERDISTEIYQAGSTPCNGVEGFNCYFPLQSYGFQPTNGVGYQPYRVVVLSFELLHAPPKSCDKTHTCPPCPAPELLGGPSVFLFPPKPKDTLMISRTPEVTCVVVDVSHEDPEVKFNWYVDGVEVHNAKTKPREEQYNSTYRVVSVLTVLHQDWLNGKEYKCKVSNKALPAPIEKTISKAKGQPREPQVYTLPPSRDELTKNQVSLTCLVKGFYPSDIAVEWESNGQPENNYKTTPPVLDSDGSFFLYSKLTVDKSRWQQGNVFSCSVMHEALKFHYTQKSLSLSPGK

SEQ ID NO: 111 - DNA, 1317 bp, Artificial Sequence
  Synthetic
atgttcgtcttcctcgtgctgctcccactcgtttcttcccagtgtcctaatatcactaacctgtgtcctttcggtgaagtgttcaacgccaccaggtttgctagcgtgtatgcctggaacaggaagaggatctctaactgcgtcgccgactattccgtgctgtataacagcgcctccttctccacattcaaatgctatggagtgagcccgacaaaactgaacgatctctgctttacaaatgtctacgccgactcttttgtgatcagaggggacgaggtccggcagatcgcaccaggacagacaggcaagattgctgactacaactataagctgcctgacgacttcacaggatgtgtgatcgcatggaactcaaacaatctggactccaaagtcgggggcaactataattacctgtatcgcctgttccggaagtccaacctgaagcccttcgagagggacatcagtacagagatctatcaggctggctccaccccttgcaatggcgtcgaaggctttaattgttattttcccctgcagtcttacgggtttcagcctactaatggagttgggtaccagccatacagagtggtcgtgctcagcttcgagctcctgcatgctccacctaagtcctgcgacaaaacccatacatgtccaccatgcccagctcctgaactgctcggcgggcctagtgttttcctcttccctcctaagcccaaggataccctcatgatctctcgcacaccagaagtgacctgcgtggtcgtggatgtctctcacgaggatcctgaagtgaagtttaactggtatgtcgacggagtggaagtgcacaacgccaagacaaagccaagagaagaacaatacaattctacttatagggtggtgtctgtgctgacagtgctgcaccaggattggctgaatggaaaagaatataagtgtaaggtctctaacaaggccctgcccgctccaattgagaagacaatttccaaggccaaggggcagcctcgggaacctcaggtgtacacactgcccccatccagggatgaactgactaaaaatcaggtgtctctgacatgcctggtgaaagggttttatccaagtgacattgctgtggagtgggagtctaatgggcagcctgaaaataactacaagaccacaccaccagtgctcgatagcgacgggtctttctttctgtattctaaactgaccgtggataaatctcggtggcagcagggaaacgtgttttcttgctcagtgatgcacgaagctctgaaatttcactatacacagaaatccctgtccctgtctccaggcaaataa

SEQ ID NO: 112 - DNA, 582 bp, Artificial Sequence
  Synthetic
atgggtgtgcacgaatgtcctgcttggctgtggctccttctctccctgctgtccctgcctcttggactcccggtgcttggagcacccccgagactgatctgcgacagcagggtgctcgagcgctacctcctggaagccaaggaagccgaaaacatcactactggctgcgccgaacactgctccctgaacgagaacatcaccgtgccggacaccaaggtcaacttctacgcgtggaagagaatggaggtcggacagcaagccgtggaagtgtggcagggacttgcgctcctgtcggaagccgtgctgaggggacaagccctgctcgtgaacagctcacagccttgggagcccctgcagctgcatgtcgacaaggccgtgtccggactgcgctcactgaccactctgctgagggccttgggtgcccagaaagaggctatttccccaccggatgcagcctcggcagctcctctgcggaccattacggcggacacctttcggaagctgttccgcgtctacagcaatttcctccgggggaagttgaaactgtataccggcgaagcctgtcggactggcgatcgctga

SEQ ID NO: 113 - DNA, 582 bp, Artificial Sequence
  Synthetic
atgggggttcatgagtgcccagcttggctttggctcctgctcagcttgcttagtctccctttgggcctgcccgtgctgggcgcccctccacgcttgatctgtgacagcagggtcttggaacggtatttgcttgaagctaaagaagctgagaacataacaacgggatgtgctgaacattgctccttgaacgaaaacatcacagttcccgacacaaaagtcaatttttacgcatggaagcggatggaggttggccagcaagctgtggaggtctggcaagggctggctcttctcagtgaagccgtgctgcgcggacaagcactcttggtgaactccagccagccctgggagccccttcagctccatgtcgataaagcagttagcggcctccgatcattgactaccctccttagggctttgggtgcacaaaaagaggccatttcaccaccggacgcggcaagtgctgctccgttgcgaactataactgctgacaccttccggaaactttttcgggtatattccaactttctcagggggaaactcaagctctacaccggcgaggcgtgccgaactggagaccgctga

SEQ ID NO: 114 - DNA, 582 bp, Artificial Sequence
  Synthetic
atgggcgtacatgaatgcccggcatggctttggctgctgctgtccctgctgagtttgccgctgggcctccccgtcctcggcgctcccccgagactcatttgcgactctagggtcctcgaacgctatctgctggaagcaaaagaagctgagaacataactacaggatgcgctgagcactgttccttgaatgagaatatcacagtacctgacactaaggtgaatttttacgcatggaaacgcatggaagtgggtcagcaggccgtggaagtgtggcagggcctggcgctgctgtccgaggctgttcttagaggccaagccttgttggtcaattcctctcaaccctgggagcccctccagctgcatgttgataaagccgtctctggtctccggtcccttaccaccctgctcagggcacttggcgcacagaaggaagctatctcccccccagacgctgccagtgccgcccccctccggactattaccgccgatactttcaggaaactgtttcgagtctatagcaattttctccgcgggaaactgaagctgtatacaggtgaggcctgcaggacaggagatcgctga

SEQ ID NO: 115 - DNA, 582 bp, Artificial Sequence
  Synthetic
atgggcgtgcacgaatgtcctgcttggctgtggctgctgctgagtctgctgtctctgcctctgggactgcctgttcttggagcccctcctagactgatctgcgacagcagagtgctggaaagatacctgctggaagccaaagaggccgagaacatcacaacaggctgtgccgagcactgcagcctgaacgagaatatcaccgtgcctgacaccaaagtgaacttctacgcctggaagcggatggaagtgggacagcaggctgtggaagtttggcaaggactggccctgctgtctgaagctgttctgagaggacaggctctgctggtcaatagctctcagccttgggaacctctccagctgcatgtggataaggccgtgtctggcctgagaagcctgacaacactgctgagagccctgggagcccagaaagaggccatttctccacctgatgctgccagcgctgcccctctgagaacaatcaccgccgacaccttcagaaagctgttccgggtgtacagcaacttcctgcggggcaagctgaaactgtacaccggcgaagcctgcagaaccggcgatagataa

SEQ ID NO: 116 - DNA, 582 bp, Artificial Sequence
  Synthetic
atgggggtgcacgagtgccctgcctggctgtggttgctgctgtccctgctgtctctgccactgggactgccagtgctgggagctccacctaggctgatctgcgacagccgggtcctggagaggtacctgctcgaggccaaggaggccgagaacattaccacaggctgcgccgagcactgcagcctgaacgagaacattacagtgcccgatacaaaggtgaacttctacgcctggaagaggatggaggtgggccagcaggccgtggaggtgtggcaggggctggccctgctgagcgaggccgtgctgaggggccaagccctgctggtcaacagcagccagccttgggagcccctgcagctccacgtggacaaggctgtgtctggcttgaggtctctcacaacattgctgagggccctgggcgcacagaaagaagctatcagcccacctgatgccgctagtgccgctccactgcggacaattaccgccgatacctttagaaaattgttcagggtctactccaactttttgcgcgggaagctgaagctctataccggcgaggcctgccggacaggggacagatga

SEQ ID NO: 117 - DNA, 582 bp, Artificial Sequence
  Synthetic
atgggagtgcacgaatgtcctgcatggctctggctcctgctgtctctcctgagcctgccactgggactcccagtgctgggagcaccccctaggctgatctgcgattctcgggtgctggagcgctacctgctcgaggctaaggaggccgagaatatcactactgggtgtgccgaacactgtagcctcaatgaaaacattacagtcccagataccaaggtgaacttttatgcatggaagaggatggaggtcgggcagcaggcagtggaggtgtggcagggactggctctgctgtccgaagccgtgctcagaggtcaggccctgctggttaattccagccagccttgggaacctctgcagctgcatgtggacaaggcagtgtctggcctgagatcccttactacactgctgagagcactgggggctcagaaagaagctatttccccaccagacgccgcctcagcagcacctctccggaccatcactgctgacaccttccgcaagctctttagggtgtactccaacttcctgcgcgggaagctcaagctgtacaccggcgaagcctgcaggaccggggatcgctga

SEQ ID NO: 118 - protein, 1273 aa, Artificial Sequence; identical to SEQ ID NO: 10
  Synthetic

SEQ ID NO: 119 - DNA, 3822 bp, Artificial Sequence
  Synthetic
atgttcgtcttcctcgtgctgctcccactcgtttcttcccagtgtgtcaacctgacaactaggactcagctgccaccagcctacaccaactccttcaccagaggcgtgtattacccagacaaggtgtttagaagcagcgtgctgcactctacccaggacctctttctgccctttttcagcaacgtgacatggtttcacgcaattcacgtgtccggcactaatggcacaaagcggttcgacaatccagtcctgcctttcaacgatggcgtctactttgcatctactgagaaatccaatatcattaggggatggatcttcggcacaaccctggattctaagacccagagcctgctgatcgtcaacaacgccacaaacgtggtcattaaggtttgcgagtttcagttctgtaacgatccttttctgggcgtgtattatcataagaacaataagagctggatggagtccgagtttagagtgtatagctctgcaaataattgtacctttgagtacgtgagccagccctttctgatggacctggagggaaaacaaggaaacttcaaaaacctgcgggaattcgttttcaaaaacatcgacggctatttcaagatctatagcaagcataccccaatcaacctcgtgagggacctcccccagggctttagcgcactggagccactggttgacctgcctatcggcattaatatcacaagatttcagaccctgctggcactgcatagaagctatctgacccctggagactcctctagtgggtggactgccggcgccgctgcctactatgtgggctatctgcagccacggacattcctgctgaaatacaatgagaacgggacaatcacagatgctgttgattgcgcactcgaccccctgtccgagacaaagtgcactctcaagagctttaccgtcgagaagggcatctatcagacctcaaacttcagggtgcagcccacagaatctatcgtgcgcttccctaatatcactaacctgtgtcctttcggtgaagtgttcaacgccaccaggtttgctagcgtgtatgcctggaacaggaagaggatctctaactgcgtcgccgactattccgtgctgtataacagcgcctccttctccacattcaaatgctatggagtgagcccgacaaaactgaacgatctctgctttacaaatgtctacgccgactcttttgtgatcagaggggacgaggtccggcagatcgcaccaggacagacaggcaagattgctgactacaactataagctgcctgacgacttcacaggatgtgtgatcgcatggaactcaaacaatctggactccaaagtcgggggcaactataattacctgtatcgcctgttccggaagtccaacctgaagcccttcgagagggacatcagtacagagatctatcaggctggctccaccccttgcaatggcgtcgaaggctttaattgttattttcccctgcagtcttacgggtttcagcctactaatggagttgggtaccagccatacagagtggtcgtgctcagcttcgagctcctgcatgctccagctacagtttgcgggccaaagaagtccactaacctggtgaagaataagtgcgtcaacttcaactttaacgggctcaccggcaccggcgtgctgactgagagcaacaagaagtttctgccatttcaacagtttggacgggacattgccgacaccaccgatgccgttcgggatccacagaccctggaaattctggacattacaccgtgcagcttcgggggcgtgagcgtgatcacacccggaaccaatacaagcaaccaggttgccgtcctgtatcagggcgtcaattgcacagaagtgccagttgctatccacgcagaccagctgactcccacatggcgggtgtatagcaccggatccaacgtgtttcagacccgcgccggatgtctcattggggccgagcacgtgaataacagctacgagtgcgacatccccattggcgccggcatttgtgcgtcttaccagactcagaccaactctcctagaagggccaggtccgttgctagtcagtctattattgcctataccatgagcctcggagctgagaatagcgtggcctactccaataattccatcgcaatccctactaacttcactatttctgtgaccaccgagatcctgcctgtgtctatgactaagactagcgttgattgtaccatgtatatttgtggcgactctaccgaatgttctaacctgctgcttcagtacggctcattttgcacacagctgaacagagccctgactgggatcgctgtggagcaggacaagaacacacaggaggtgtttgcacaggtgaagcagatctataagacccctcctattaaggatttcggcggattcaatttctcacagattctgccagaccccagtaagccttccaagaggagcttcatcgaggatctcctgtttaacaaggtgaccctggcagacgccggctttattaagcaatatggggattgcctgggcgacattgctgccagagacctgatttgcgcccagaaattcaatggcctcacagtgctgccacctctgctgaccgacgagatgatcgctcaatacactagcgcactgctggccggaaccatcacatcaggctggaccttcggggccggagcagcactgcagattccattcgccatgcagatggcctatagattcaacggcattggcgtcacacagaacgtgctgtacgaaaaccagaagctcatcgctaaccagtttaattccgcaattggaaagatccaagattcactcagctcaaccgcctctgcactcggaaagctgcaggacgtggtcaaccagaatgctcaggccctgaacacactcgtcaagcagctgtcctctaactttggcgctatcagctccgttctgaacgacattctgagccgcctggatcccccagaggctgaagtccagattgaccgcctgattaccggccggctgcagtctctgcaaacatacgtgacccagcagctgatcagagcagccgagatccgggcatccgcaaatctggcagcaactaagatgagcgaatgcgtgctgggccagtccaagcgggtggacttttgtggcaagggctaccacctgatgagcttcccccagagcgccccacatggcgttgtttttctgcacgtgacctatgtccctgctcaggaaaagaactttacaactgctcctgctatctgccatgacggcaaggcccacttcccacgggagggagtgtttgtgtccaatggcacacactggttcgtgacccagaggaacttctatgaaccccagatcatcaccactgacaataccttcgtgtctggaaattgcgacgtcgtgatcggcatcgttaacaacaccgtgtacgaccctctccagccagagctggactcctttaaggaggaactggataagtattttaagaaccacacaagcccagatgtggatctcggggacatctccggaattaacgcctccgtggtgaatatccagaaggagattgaccgcctaaatgaagttgccaagaacctcaatgagtctctgattgatctgcaggaactgggcaagtatgagcagtatatcaaatggccctggtacatttggctggggtttatcgccggactgattgccatcgtcatggtgaccatcatgctgtgttgcatgacctcctgttgttcctgtctgaagggctgctgtagttgcggctcttgctgtaaattcgacgaagatgatagcgagcccgtgctgaagggcgtgaagctgcattatacctga

SEQ ID NO: 120 - protein, 1273 aa, Artificial Sequence
  Synthetic
MFVFLVLLPLVSSQCVNLTTRTQLPPAYTNSFTRGVYYPDKVFRSSVLHSTQDLFLPFFSNVTWFHAIHVSGTNGTKRFDNPVLPFNDGVYFASTEKSNIIRGWIFGTTLDSKTQSLLIVNNATNVVIKVCEFQFCNDPFLGVYYHKNNKSWMESEFRVYSSANNCTFEYVSQPFLMDLEGKQGNFKNLREFVFKNIDGYFKIYSKHTPINLVRDLPQGFSALEPLVDLPIGINITRFQTLLALHRSYLTPGDSSSGWTAGAAAYYVGYLQPRTFLLKYNENGTITDAVDCALDPLSETKCTLKSFTVEKGIYQTSNFRVQPTESIVRFPNITNLCPFGEVFNATRFASVYAWNRKRISNCVADYSVLYNSASFSTFKCYGVSPTKLNDLCFTNVYADSFVIRGDEVRQIAPGQTGKIADYNYKLPDDFTGCVIAWNSNNLDSKVGGNYNYLYRLFRKSNLKPFERDISTEIYQAGSTPCNGVEGFNCYFPLQSYGFQPTNGVGYQPYRVVVLSFELLHAPATVCGPKKSTNLVKNKCVNFNFNGLTGTGVLTESNKKFLPFQQFGRDIADTTDAVRDPQTLEILDITPCSFGGVSVITPGTNTSNQVAVLYQGVNCTEVPVAIHADQLTPTWRVYSTGSNVFQTRAGCLIGAEHVNNSYECDIPIGAGICASYQTQTNSPGSASSVASQSIIAYTMSLGAENSVAYSNNSIAIPTNFTISVTTEILPVSMTKTSVDCTMYICGDSTECSNLLLQYGSFCTQLNRALTGIAVEQDKNTQEVFAQVKQIYKTPPIKDFGGFNFSQILPDPSKPSKRSFIEDLLFNKVTLADAGFIKQYGDCLGDIAARDLICAQKFNGLTVLPPLLTDEMIAQYTSALLAGTITSGWTFGAGAALQIPFAMQMAYRFNGIGVTQNVLYENQKLIANQFNSAIGKIQDSLSSTASALGKLQDVVNQNAQALNTLVKQLSSNFGAISSVLNDILSRLDPPEAEVQIDRLITGRLQSLQTYVTQQLIRAAEIRASANLAATKMSECVLGQSKRVDFCGKGYHLMSFPQSAPHGVVFLHVTYVPAQEKNFTTAPAICHDGKAHFPREGVFVSNGTHWFVTQRNFYEPQIITTDNTFVSGNCDVVIGIVNNTVYDPLQPELDSFKEELDKYFKNHTSPDVDLGDISGINASVVNIQKEIDRLNEVAKNLNESLIDLQELGKYEQYIKWPWYIWLGFIAGLIAIVMVTIMLCCMTSCCSCLKGCCSCGSCCKFDEDDSEPVLKGVKLHYT

SEQ ID NO: 121 - DNA, 3822 bp, Artificial Sequence
  Synthetic
atgttcgtcttcctcgtgctgctcccactcgtttcttcccagtgtgtcaacctgacaactaggactcagctgccaccagcctacaccaactccttcaccagaggcgtgtattacccagacaaggtgtttagaagcagcgtgctgcactctacccaggacctctttctgccctttttcagcaacgtgacatggtttcacgcaattcacgtgtccggcactaatggcacaaagcggttcgacaatccagtcctgcctttcaacgatggcgtctactttgcatctactgagaaatccaatatcattaggggatggatcttcggcacaaccctggattctaagacccagagcctgctgatcgtcaacaacgccacaaacgtggtcattaaggtttgcgagtttcagttctgtaacgatccttttctgggcgtgtattatcataagaacaataagagctggatggagtccgagtttagagtgtatagctctgcaaataattgtacctttgagtacgtgagccagccctttctgatggacctggagggaaaacaaggaaacttcaaaaacctgcgggaattcgttttcaaaaacatcgacggctatttcaagatctatagcaagcataccccaatcaacctcgtgagggacctcccccagggctttagcgcactggagccactggttgacctgcctatcggcattaatatcacaagatttcagaccctgctggcactgcatagaagctatctgacccctggagactcctctagtgggtggactgccggcgccgctgcctactatgtgggctatctgcagccacggacattcctgctgaaatacaatgagaacgggacaatcacagatgctgttgattgcgcactcgaccccctgtccgagacaaagtgcactctcaagagctttaccgtcgagaagggcatctatcagacctcaaacttcagggtgcagcccacagaatctatcgtgcgcttccctaatatcactaacctgtgtcctttcggtgaagtgttcaacgccaccaggtttgctagcgtgtatgcctggaacaggaagaggatctctaactgcgtcgccgactattccgtgctgtataacagcgcctccttctccacattcaaatgctatggagtgagcccgacaaaactgaacgatctctgctttacaaatgtctacgccgactcttttgtgatcagaggggacgaggtccggcagatcgcaccaggacagacaggcaagattgctgactacaactataagctgcctgacgacttcacaggatgtgtgatcgcatggaactcaaacaatctggactccaaagtcgggggcaactataattacctgtatcgcctgttccggaagtccaacctgaagcccttcgagagggacatcagtacagagatctatcaggctggctccaccccttgcaatggcgtcgaaggctttaattgttattttcccctgcagtcttacgggtttcagcctactaatggagttgggtaccagccatacagagtggtcgtgctcagcttcgagctcctgcatgctccagctacagtttgcgggccaaagaagtccactaacctggtgaagaataagtgcgtcaacttcaactttaacgggctcaccggcaccggcgtgctgactgagagcaacaagaagtttctgccatttcaacagtttggacgggacattgccgacaccaccgatgccgttcgggatccacagaccctggaaattctggacattacaccgtgcagcttcgggggcgtgagcgtgatcacacccggaaccaatacaagcaaccaggttgccgtcctgtatcagggcgtcaattgcacagaagtgccagttgctatccacgcagaccagctgactcccacatggcgggtgtatagcaccggatccaacgtgtttcagacccgcgccggatgtctcattggggccgagcacgtgaataacagctacgagtgcgacatccccattggcgccggcatttgtgcgtcttaccagactcagaccaactctcctggctccgcctcttccgttgctagtcagtctattattgcctataccatgagcctcggagctgagaatagcgtggcctactccaataattccatcgcaatccctactaacttcactatttctgtgaccaccgagatcctgcctgtgtctatgactaagactagcgttgattgtaccatgtatatttgtggcgactctaccgaatgttctaacctgctgcttcagtacggctcattttgcacacagctgaacagagccctgactgggatcgctgtggagcaggacaagaacacacaggaggtgtttgcacaggtgaagcagatctataagacccctcctattaaggatttcggcggattcaatttctcacagattctgccagaccccagtaagccttccaagaggagcttcatcgaggatctcctgtttaacaaggtgaccctggcagacgccggctttattaagcaatatggggattgcctgggcgacattgctgccagagacctgatttgcgcccagaaattcaatggcctcacagtgctgccacctctgctgaccgacgagatgatcgctcaatacactagcgcactgctggccggaaccatcacatcaggctggaccttcggggccggagcagcactgcagattccattcgccatgcagatggcctatagattcaacggcattggcgtcacacagaacgtgctgtacgaaaaccagaagctcatcgctaaccagtttaattccgcaattggaaagatccaagattcactcagctcaaccgcctctgcactcggaaagctgcaggacgtggtcaaccagaatgctcaggccctgaacacactcgtcaagcagctgtcctctaactttggcgctatcagctccgttctgaacgacattctgagccgcctggatcccccagaggctgaagtccagattgaccgcctgattaccggccggctgcagtctctgcaaacatacgtgacccagcagctgatcagagcagccgagatccgggcatccgcaaatctggcagcaactaagatgagcgaatgcgtgctgggccagtccaagcgggtggacttttgtggcaagggctaccacctgatgagcttcccccagagcgccccacatggcgttgtttttctgcacgtgacctatgtccctgctcaggaaaagaactttacaactgctcctgctatctgccatgacggcaaggcccacttcccacgggagggagtgtttgtgtccaatggcacacactggttcgtgacccagaggaacttctatgaaccccagatcatcaccactgacaataccttcgtgtctggaaattgcgacgtcgtgatcggcatcgttaacaacaccgtgtacgaccctctccagccagagctggactcctttaaggaggaactggataagtattttaagaaccacacaagcccagatgtggatctcggggacatctccggaattaacgcctccgtggtgaatatccagaaggagattgaccgcctaaatgaagttgccaagaacctcaatgagtctctgattgatctgcaggaactgggcaagtatgagcagtatatcaaatggccctggtacatttggctggggtttatcgccggactgattgccatcgtcatggtgaccatcatgctgtgttgcatgacctcctgttgttcctgtctgaagggctgctgtagttgcggctcttgctgtaaattcgacgaagatgatagcgagcccgtgctgaagggcgtgaagctgcattatacctga

SEQ ID NO: 122 - DNA, 3849 bp, Artificial Sequence
  Synthetic
atgttcctgctgacaacaaaaagaaccatgtttgtgttcctggtgctgctgcctctggtgtcctcacagtgtgtcaacctgacaacaagaactcagctgccaccagcctacaccaactccttcaccagaggcgtgtattacccagacaaggtgtttagaagcagcgtgctgcactctacccaggacctctttctgccctttttcagcaacgtgacatggtttcacgcaattcacgtgtccggcactaatggcacaaagcggttcgacaatccagtcctgcctttcaacgatggcgtctactttgcatctactgagaaatccaatatcattaggggatggatcttcggcacaaccctggattctaagacccagagcctgctgatcgtcaacaacgccacaaacgtggtcattaaggtttgcgagtttcagttctgtaacgatccttttctgggcgtgtattatcataagaacaataagagctggatggagtccgagtttagagtgtatagctctgcaaataattgtacctttgagtacgtgagccagccctttctgatggacctggagggaaaacaaggaaacttcaaaaacctgcgggaattcgttttcaaaaacatcgacggctatttcaagatctatagcaagcataccccaatcaacctcgtgagggacctcccccagggctttagcgcactggagccactggttgacctgcctatcggcattaatatcacaagatttcagaccctgctggcactgcatagaagctatctgacccctggagactcctctagtgggtggactgccggcgccgctgcctactatgtgggctatctgcagccacggacattcctgctgaaatacaatgagaacgggacaatcacagatgctgttgattgcgcactcgaccccctgtccgagacaaagtgcactctcaagagctttaccgtcgagaagggcatctatcagacctcaaacttcagggtgcagcccacagaatctatcgtgcgcttccctaatatcactaacctgtgtcctttcggtgaagtgttcaacgccaccaggtttgctagcgtgtatgcctggaacaggaagaggatctctaactgcgtcgccgactattccgtgctgtataacagcgcctccttctccacattcaaatgctatggagtgagcccgacaaaactgaacgatctctgctttacaaatgtctacgccgactcttttgtgatcagaggggacgaggtccggcagatcgcaccaggacagacaggcaagattgctgactacaactataagctgcctgacgacttcacaggatgtgtgatcgcatggaactcaaacaatctggactccaaagtcgggggcaactataattacctgtatcgcctgttccggaagtccaacctgaagcccttcgagagggacatcagtacagagatctatcaggctggctccaccccttgcaatggcgtcgaaggctttaattgttattttcccctgcagtcttacgggtttcagcctactaatggagttgggtaccagccatacagagtggtcgtgctcagcttcgagctcctgcatgctccagctacagtttgcgggccaaagaagtccactaacctggtgaagaataagtgcgtcaacttcaactttaacgggctcaccggcaccggcgtgctgactgagagcaacaagaagtttctgccatttcaacagtttggacgggacattgccgacaccaccgatgccgttcgggatccacagaccctggaaattctggacattacaccgtgcagcttcgggggcgtgagcgtgatcacacccggaaccaatacaagcaaccaggttgccgtcctgtatcaggatgtcaattgcacagaagtgccagttgctatccacgcagaccagctgactcccacatggcgggtgtatagcaccggatccaacgtgtttcagacccgcgccggatgtctcattggggccgagcacgtgaataacagctacgagtgcgacatccccattggcgccggcatttgtgcgtcttaccagactcagaccaactctcctggctccgcctcttccgttgctagtcagtctattattgcctataccatgagcctcggagctgagaatagcgtggcctactccaataattccatcgcaatccctactaacttcactatttctgtgaccaccgagatcctgcctgtgtctatgactaagactagcgttgattgtaccatgtatatttgtggcgactctaccgaatgttctaacctgctgcttcagtacggctcattttgcacacagctgaacagagccctgactgggatcgctgtggagcaggacaagaacacacaggaggtgtttgcacaggtgaagcagatctataagacccctcctattaaggatttcggcggattcaatttctcacagattctgccagaccccagtaagccttccaagaggagcttcatcgaggatctcctgtttaacaaggtgaccctggcagacgccggctttattaagcaatatggggattgcctgggcgacattgctgccagagacctgatttgcgcccagaaattcaatggcctcacagtgctgccacctctgctgaccgacgagatgatcgctcaatacactagcgcactgctggccggaaccatcacatcaggctggaccttcggggccggagcagcactgcagattccattcgccatgcagatggcctatagattcaacggcattggcgtcacacagaacgtgctgtacgaaaaccagaagctcatcgctaaccagtttaattccgcaattggaaagatccaagattcactcagctcaaccgcctctgcactcggaaagctgcaggacgtggtcaaccagaatgctcaggccctgaacacactcgtcaagcagctgtcctctaactttggcgctatcagctccgttctgaacgacattctgagccgcctggatcccccagaggctgaagtccagattgaccgcctgattaccggccggctgcagtctctgcaaacatacgtgacccagcagctgatcagagcagccgagatccgggcatccgcaaatctggcagcaactaagatgagcgaatgcgtgctgggccagtccaagcgggtggacttttgtggcaagggctaccacctgatgagcttcccccagagcgccccacatggcgttgtttttctgcacgtgacctatgtccctgctcaggaaaagaactttacaactgctcctgctatctgccatgacggcaaggcccacttcccacgggagggagtgtttgtgtccaatggcacacactggttcgtgacccagaggaacttctatgaaccccagatcatcaccactgacaataccttcgtgtctggaaattgcgacgtcgtgatcggcatcgttaacaacaccgtgtacgaccctctccagccagagctggactcctttaaggaggaactggataagtattttaagaaccacacaagcccagatgtggatctcggggacatctccggaattaacgcctccgtggtgaatatccagaaggagattgaccgcctaaatgaagttgccaagaacctcaatgagtctctgattgatctgcaggaactgggcaagtatgagcagtatatcaaatggccctggtacatttggctggggtttatcgccggactgattgccatcgtcatggtgaccatcatgctgtgttgcatgacctcctgttgttcctgtctgaagggctgctgtagttgcggctcttgctgtaaattcgacgaagatgatagcgagcccgtgctgaagggcgtgaagctgcattatacctga

SEQ ID NO: 123 - protein, 1282 aa, Artificial Sequence
  Synthetic
MFLLTTKRTMFVFLVLLPLVSSQCVNLTTRTQLPPAYTNSFTRGVYYPDKVFRSSVLHSTQDLFLPFFSNVTWFHAIHVSGTNGTKRFDNPVLPFNDGVYFASTEKSNIIRGWIFGTTLDSKTQSLLIVNNATNVVIKVCEFQFCNDPFLGVYYHKNNKSWMESEFRVYSSANNCTFEYVSQPFLMDLEGKQGNFKNLREFVFKNIDGYFKIYSKHTPINLVRDLPQGFSALEPLVDLPIGINITRFQTLLALHRSYLTPGDSSSGWTAGAAAYYVGYLQPRTFLLKYNENGTITDAVDCALDPLSETKCTLKSFTVEKGIYQTSNFRVQPTESIVRFPNITNLCPFGEVFNATRFASVYAWNRKRISNCVADYSVLYNSASFSTFKCYGVSPTKLNDLCFTNVYADSFVIRGDEVRQIAPGQTGKIADYNYKLPDDFTGCVIAWNSNNLDSKVGGNYNYLYRLFRKSNLKPFERDISTEIYQAGSTPCNGVEGFNCYFPLQSYGFQPTNGVGYQPYRVVVLSFELLHAPATVCGPKKSTNLVKNKCVNFNFNGLTGTGVLTESNKKFLPFQQFGRDIADTTDAVRDPQTLEILDITPCSFGGVSVITPGTNTSNQVAVLYQDVNCTEVPVAIHADQLTPTWRVYSTGSNVFQTRAGCLIGAEHVNNSYECDIPIGAGICASYQTQTNSPGSASSVASQSIIAYTMSLGAENSVAYSNNSIAIPTNFTISVTTEILPVSMTKTSVDCTMYICGDSTECSNLLLQYGSFCTQLNRALTGIAVEQDKNTQEVFAQVKQIYKTPPIKDFGGFNFSQILPDPSKPSKRSFIEDLLFNKVTLADAGFIKQYGDCLGDIAARDLICAQKFNGLTVLPPLLTDEMIAQYTSALLAGTITSGWTFGAGAALQIPFAMQMAYRFNGIGVTQNVLYENQKLIANQFNSAIGKIQDSLSSTASALGKLQDVVNQNAQALNTLVKQLSSNFGAISSVLNDILSRLDPPEAEVQIDRLITGRLQSLQTYVTQQLIRAAEIRASANLAATKMSECVLGQSKRVDFCGKGYHLMSFPQSAPHGVVFLHVTYVPAQEKNFTTAPAICHDGKAHFPREGVFVSNGTHWFVTQRNFYEPQIITTDNTFVSGNCDVVIGIVNNTVYDPLQPELDSFKEELDKYFKNHTSPDVDLGDISGINASVVNIQKEIDRLNEVAKNLNESLIDLQELGKYEQYIKWPWYIWLGFIAGLIAIVMVTIMLCCMTSCCSCLKGCCSCGSCCKFDEDDSEPVLKGVKLHYT

SEQ ID NO: 124 - DNA, 3822 bp, Artificial Sequence
  Synthetic
atgttcgtcttcctcgtgctgctcccactcgtttcttcccagtgtgtcaacctgacaactaggactcagctgccaccagcctacaccaactccttcaccagaggcgtgtattacccagacaaggtgtttagaagcagcgtgctgcactctacccaggacctctttctgccctttttcagcaacgtgacatggtttcacgcaattcacgtgtccggcactaatggcacaaagcggttcgacaatccagtcctgcctttcaacgatggcgtctactttgcatctactgagaaatccaatatcattaggggatggatcttcggcacaaccctggattctaagacccagagcctgctgatcgtcaacaacgccacaaacgtggtcattaaggtttgcgagtttcagttctgtaacgatccttttctgggcgtgtattatcataagaacaataagagctggatggagtccgagtttagagtgtatagctctgcaaataattgtacctttgagtacgtgagccagccctttctgatggacctggagggaaaacaaggaaacttcaaaaacctgcgggaattcgttttcaaaaacatcgacggctatttcaagatctatagcaagcataccccaatcaacctcgtgagggacctcccccagggctttagcgcactggagccactggttgacctgcctatcggcattaatatcacaagatttcagaccctgctggcactgcatagaagctatctgacccctggagactcctctagtgggtggactgccggcgccgctgcctactatgtgggctatctgcagccacggacattcctgctgaaatacaatgagaacgggacaatcacagatgctgttgattgcgcactcgaccccctgtccgagacaaagtgcactctcaagagctttaccgtcgagaagggcatctatcagacctcaaacttcagggtgcagcccacagaatctatcgtgcgcttccctaatatcactaacctgtgtcctttcggtgaagtgttcaacgccaccaggtttgctagcgtgtatgcctggaacaggaagaggatctctaactgcgtcgccgactattccgtgctgtataacagcgcctccttctccacattcaaatgctatggagtgagcccgacaaaactgaacgatctctgctttacaaatgtctacgccgactcttttgtgatcagaggggacgaggtccggcagatcgcaccaggacagacaggcaagattgctgactacaactataagctgcctgacgacttcacaggatgtgtgatcgcatggaactcaaacaatctggactccaaagtcgggggcaactataattacctgtatcgcctgttccggaagtccaacctgaagcccttcgagagggacatcagtacagagatctatcaggctggctccaccccttgcaatggcgtcgaaggctttaattgttattttcccctgcagtcttacgggtttcagcctactaatggagttgggtaccagccatacagagtggtcgtgctcagcttcgagctcctgcatgctccagctacagtttgcgggccaaagaagtccactaacctggtgaagaataagtgcgtcaacttcaactttaacgggctcaccggcaccggcgtgctgactgagagcaacaagaagtttctgccatttcaacagtttggacgggacattgccgacaccaccgatgccgttcgggatccacagaccctggaaattctggacattacaccgtgcagcttcgggggcgtgagcgtgatcacacccggaaccaatacaagcaaccaggttgccgtcctgtatcaggatgtcaattgcacagaagtgccagttgctatccacgcagaccagctgactcccacatggcgggtgtatagcaccggatccaacgtgtttcagacccgcgccggatgtctcattggggccgagcacgtgaataacagctacgagtgcgacatccccattggcgccggcatttgtgcgtcttaccagactcagaccaactctcctggctccgcctcttccgttgctagtcagtctattattgcctataccatgagcctcggagctgagaatagcgtggcctactccaataattccatcgcaatccctactaacttcactatttctgtgaccaccgagatcctgcctgtgtctatgactaagactagcgttgattgtaccatgtatatttgtggcgactctaccgaatgttctaacctgctgcttcagtacggctcattttgcacacagctgaacagagccctgactgggatcgctgtggagcaggacaagaacacacaggaggtgtttgcacaggtgaagcagatctataagacccctcctattaaggatttcggcggattcaatttctcacagattctgccagaccccagtaagccttccaagaggagcttcatcgaggatctcctgtttaacaaggtgaccctggcagacgccggctttattaagcaatatggggattgcctgggcgacattgctgccagagacctgatttgcgcccagaaattcaatggcctcacagtgctgccacctctgctgaccgacgagatgatcgctcaatacactagcgcactgctggccggaaccatcacatcaggctggaccttcggggccggagcagcactgcagattccattcgccatgcagatggcctatagattcaacggcattggcgtcacacagaacgtgctgtacgaaaaccagaagctcatcgctaaccagtttaattccgcaattggaaagatccaagattcactcagctcaaccgcctctgcactcggaaagctgcaggacgtggtcaaccagaatgctcaggccctgaacacactcgtcaagcagctgtcctctaactttggcgctatcagctccgttctgaacgacattctgagccgcctggatcccccagaggctgaagtccagattgaccgcctgattaccggccggctgcagtctctgcaaacatacgtgacccagcagctgatcagagcagccgagatccgggcatccgcaaatctggcagcaactaagatgagcgaatgcgtgctgggccagtccaagcgggtggacttttgtggcaagggctaccacctgatgagcttcccccagagcgccccacatggcgttgtttttctgcacgtgacctatgtccctgctcaggaaaagaactttacaactgctcctgctatctgccatgacggcaaggcccacttcccacgggagggagtgtttgtgtccaatggcacacactggttcgtgacccagaggaacttctatgaaccccagatcatcaccactgacaataccttcgtgtctggaaattgcgacgtcgtgatcggcatcgttaacaacaccgtgtacgaccctctccagccagagctggactcctttaaggaggaactggataagtattttaagaaccacacaagcccagatgtggatctcggggacatctccggaattaacgcctccgtggtgaatatccagaaggagattgaccgcctaaatgaagttgccaagaacctcaatgagtctctgattgatctgcaggaactgggcaagtatgagcagtatatcaaatggccctggtacatttggctggggtttatcgccggactgattgccatcgtcatggtgaccatcatgctgtgttgcatgacctcctgttgttcctgtctgaagggctgctgtagttgcggctcttgctgtaaattcgacgaagatgatagcgagcccgtgctgaagggcgtggccctggcttatacctga

SEQ ID NO: 125 - protein, 1273 aa, Artificial Sequence
  Synthetic
MFVFLVLLPLVSSQCVNLTTRTQLPPAYTNSFTRGVYYPDKVFRSSVLHSTQDLFLPFFSNVTWFHAIHVSGTNGTKRFDNPVLPFNDGVYFASTEKSNIIRGWIFGTTLDSKTQSLLIVNNATNVVIKVCEFQFCNDPFLGVYYHKNNKSWMESEFRVYSSANNCTFEYVSQPFLMDLEGKQGNFKNLREFVFKNIDGYFKIYSKHTPINLVRDLPQGFSALEPLVDLPIGINITRFQTLLALHRSYLTPGDSSSGWTAGAAAYYVGYLQPRTFLLKYNENGTITDAVDCALDPLSETKCTLKSFTVEKGIYQTSNFRVQPTESIVRFPNITNLCPFGEVFNATRFASVYAWNRKRISNCVADYSVLYNSASFSTFKCYGVSPTKLNDLCFTNVYADSFVIRGDEVRQIAPGQTGKIADYNYKLPDDFTGCVIAWNSNNLDSKVGGNYNYLYRLFRKSNLKPFERDISTEIYQAGSTPCNGVEGFNCYFPLQSYGFQPTNGVGYQPYRVVVLSFELLHAPATVCGPKKSTNLVKNKCVNFNFNGLTGTGVLTESNKKFLPFQQFGRDIADTTDAVRDPQTLEILDITPCSFGGVSVITPGTNTSNQVAVLYQDVNCTEVPVAIHADQLTPTWRVYSTGSNVFQTRAGCLIGAEHVNNSYECDIPIGAGICASYQTQTNSPGSASSVASQSIIAYTMSLGAENSVAYSNNSIAIPTNFTISVTTEILPVSMTKTSVDCTMYICGDSTECSNLLLQYGSFCTQLNRALTGIAVEQDKNTQEVFAQVKQIYKTPPIKDFGGFNFSQILPDPSKPSKRSFIEDLLFNKVTLADAGFIKQYGDCLGDIAARDLICAQKFNGLTVLPPLLTDEMIAQYTSALLAGTITSGWTFGAGAALQIPFAMQMAYRFNGIGVTQNVLYENQKLIANQFNSAIGKIQDSLSSTASALGKLQDVVNQNAQALNTLVKQLSSNFGAISSVLNDILSRLDPPEAEVQIDRLITGRLQSLQTYVTQQLIRAAEIRASANLAATKMSECVLGQSKRVDFCGKGYHLMSFPQSAPHGVVFLHVTYVPAQEKNFTTAPAICHDGKAHFPREGVFVSNGTHWFVTQRNFYEPQIITTDNTFVSGNCDVVIGIVNNTVYDPLQPELDSFKEELDKYFKNHTSPDVDLGDISGINASVVNIQKEIDRLNEVAKNLNESLIDLQELGKYEQYIKWPWYIWLGFIAGLIAIVMVTIMLCCMTSCCSCLKGCCSCGSCCKFDEDDSEPVLKGVALAYT

SEQ ID NO: 126 - DNA, 3849 bp, Artificial Sequence
  Synthetic
atgttcctgctgacaacaaaaagaaccatgtttgtgttcctggtgctgctgcctctggtgtcctcacagtgtgtcaacctgacaacaagaactcagctgccaccagcctacaccaactccttcaccagaggcgtgtattacccagacaaggtgtttagaagcagcgtgctgcactctacccaggacctctttctgccctttttcagcaacgtgacatggtttcacgcaattcacgtgtccggcactaatggcacaaagcggttcgacaatccagtcctgcctttcaacgatggcgtctactttgcatctactgagaaatccaatatcattaggggatggatcttcggcacaaccctggattctaagacccagagcctgctgatcgtcaacaacgccacaaacgtggtcattaaggtttgcgagtttcagttctgtaacgatccttttctgggcgtgtattatcataagaacaataagagctggatggagtccgagtttagagtgtatagctctgcaaataattgtacctttgagtacgtgagccagccctttctgatggacctggagggaaaacaaggaaacttcaaaaacctgcgggaattcgttttcaaaaacatcgacggctatttcaagatctatagcaagcataccccaatcaacctcgtgagggacctcccccagggctttagcgcactggagccactggttgacctgcctatcggcattaatatcacaagatttcagaccctgctggcactgcatagaagctatctgacccctggagactcctctagtgggtggactgccggcgccgctgcctactatgtgggctatctgcagccacggacattcctgctgaaatacaatgagaacgggacaatcacagatgctgttgattgcgcactcgaccccctgtccgagacaaagtgcactctcaagagctttaccgtcgagaagggcatctatcagacctcaaacttcagggtgcagcccacagaatctatcgtgcgcttccctaatatcactaacctgtgtcctttcggtgaagtgttcaacgccaccaggtttgctagcgtgtatgcctggaacaggaagaggatctctaactgcgtcgccgactattccgtgctgtataacagcgcctccttctccacattcaaatgctatggagtgagcccgacaaaactgaacgatctctgctttacaaatgtctacgccgactcttttgtgatcagaggggacgaggtccggcagatcgcaccaggacagacaggcaagattgctgactacaactataagctgcctgacgacttcacaggatgtgtgatcgcatggaactcaaacaatctggactccaaagtcgggggcaactataattacctgtatcgcctgttccggaagtccaacctgaagcccttcgagagggacatcagtacagagatctatcaggctggctccaccccttgcaatggcgtcgaaggctttaattgttattttcccctgcagtcttacgggtttcagcctactaatggagttgggtaccagccatacagagtggtcgtgctcagcttcgagctcctgcatgctccagctacagtttgcgggccaaagaagtccactaacctggtgaagaataagtgcgtcaacttcaactttaacgggctcaccggcaccggcgtgctgactgagagcaacaagaagtttctgccatttcaacagtttggacgggacattgccgacaccaccgatgccgttcgggatccacagaccctggaaattctggacattacaccgtgcagcttcgggggcgtgagcgtgatcacacccggaaccaatacaagcaaccaggttgccgtcctgtatcaggatgtcaattgcacagaagtgccagttgctatccacgcagaccagctgactcccacatggcgggtgtatagcaccggatccaacgtgtttcagacccgcgccggatgtctcattggggccgagcacgtgaataacagctacgagtgcgacatccccattggcgccggcatttgtgcgtcttaccagactcagaccaactctcctggctccgcctcttccgttgctagtcagtctattattgcctataccatgagcctcggagctgagaatagcgtggcctactccaataattccatcgcaatccctactaacttcactatttctgtgaccaccgagatcctgcctgtgtctatgactaagactagcgttgattgtaccatgtatatttgtggcgactctaccgaatgttctaacctgctgcttcagtacggctcattttgcacacagctgaacagagccctgactgggatcgctgtggagcaggacaagaacacacaggaggtgtttgcacaggtgaagcagatctataagacccctcctattaaggatttcggcggattcaatttctcacagattctgccagaccccagtaagccttccaagaggagcttcatcgaggatctcctgtttaacaaggtgaccctggcagacgccggctttattaagcaatatggggattgcctgggcgacattgctgccagagacctgatttgcgcccagaaattcaatggcctcacagtgctgccacctctgctgaccgacgagatgatcgctcaatacactagcgcactgctggccggaaccatcacatcaggctggaccttcggggccggagcagcactgcagattccattcgccatgcagatggcctatagattcaacggcattggcgtcacacagaacgtgctgtacgaaaaccagaagctcatcgctaaccagtttaattccgcaattggaaagatccaagattcactcagctcaaccgcctctgcactcggaaagctgcaggacgtggtcaaccagaatgctcaggccctgaacacactcgtcaagcagctgtcctctaactttggcgctatcagctccgttctgaacgacattctgagccgcctggatcccccagaggctgaagtccagattgaccgcctgattaccggccggctgcagtctctgcaaacatacgtgacccagcagctgatcagagcagccgagatccgggcatccgcaaatctggcagcaactaagatgagcgaatgcgtgctgggccagtccaagcgggtggacttttgtggcaagggctaccacctgatgagcttcccccagagcgccccacatggcgttgtttttctgcacgtgacctatgtccctgctcaggaaaagaactttacaactgctcctgctatctgccatgacggcaaggcccacttcccacgggagggagtgtttgtgtccaatggcacacactggttcgtgacccagaggaacttctatgaaccccagatcatcaccactgacaataccttcgtgtctggaaattgcgacgtcgtgatcggcatcgttaacaacaccgtgtacgaccctctccagccagagctggactcctttaaggaggaactggataagtattttaagaaccacacaagcccagatgtggatctcggggacatctccggaattaacgcctccgtggtgaatatccagaaggagattgaccgcctaaatgaagttgccaagaacctcaatgagtctctgattgatctgcaggaactgggcaagtatgagcagtatatcaaatggccctggtacatttggctggggtttatcgccggactgattgccatcgtcatggtgaccatcatgctgtgttgcatgacctcctgttgttcctgtctgaagggctgctgtagttgcggctcttgctgtaaattcgacgaagatgatagcgagcccgtgctgaagggcgtggccctggcttatacctga

SEQ ID NO: 127 - protein, 1282 aa, Artificial Sequence
  Synthetic
MFLLTTKRTMFVFLVLLPLVSSQCVNLTTRTQLPPAYTNSFTRGVYYPDKVFRSSVLHSTQDLFLPFFSNVTWFHAIHVSGTNGTKRFDNPVLPFNDGVYFASTEKSNIIRGWIFGTTLDSKTQSLLIVNNATNVVIKVCEFQFCNDPFLGVYYHKNNKSWMESEFRVYSSANNCTFEYVSQPFLMDLEGKQGNFKNLREFVFKNIDGYFKIYSKHTPINLVRDLPQGFSALEPLVDLPIGINITRFQTLLALHRSYLTPGDSSSGWTAGAAAYYVGYLQPRTFLLKYNENGTITDAVDCALDPLSETKCTLKSFTVEKGIYQTSNFRVQPTESIVRFPNITNLCPFGEVFNATRFASVYAWNRKRISNCVADYSVLYNSASFSTFKCYGVSPTKLNDLCFTNVYADSFVIRGDEVRQIAPGQTGKIADYNYKLPDDFTGCVIAWNSNNLDSKVGGNYNYLYRLFRKSNLKPFERDISTEIYQAGSTPCNGVEGFNCYFPLQSYGFQPTNGVGYQPYRVVVLSFELLHAPATVCGPKKSTNLVKNKCVNFNFNGLTGTGVLTESNKKFLPFQQFGRDIADTTDAVRDPQTLEILDITPCSFGGVSVITPGTNTSNQVAVLYQDVNCTEVPVAIHADQLTPTWRVYSTGSNVFQTRAGCLIGAEHVNNSYECDIPIGAGICASYQTQTNSPGSASSVASQSIIAYTMSLGAENSVAYSNNSIAIPTNFTISVTTEILPVSMTKTSVDCTMYICGDSTECSNLLLQYGSFCTQLNRALTGIAVEQDKNTQEVFAQVKQIYKTPPIKDFGGFNFSQILPDPSKPSKRSFIEDLLFNKVTLADAGFIKQYGDCLGDIAARDLICAQKFNGLTVLPPLLTDEMIAQYTSALLAGTITSGWTFGAGAALQIPFAMQMAYRFNGIGVTQNVLYENQKLIANQFNSAIGKIQDSLSSTASALGKLQDVVNQNAQALNTLVKQLSSNFGAISSVLNDILSRLDPPEAEVQIDRLITGRLQSLQTYVTQQLIRAAEIRASANLAATKMSECVLGQSKRVDFCGKGYHLMSFPQSAPHGVVFLHVTYVPAQEKNFTTAPAICHDGKAHFPREGVFVSNGTHWFVTQRNFYEPQIITTDNTFVSGNCDVVIGIVNNTVYDPLQPELDSFKEELDKYFKNHTSPDVDLGDISGINASVVNIQKEIDRLNEVAKNLNESLIDLQELGKYEQYIKWPWYIWLGFIAGLIAIVMVTIMLCCMTSCCSCLKGCCSCGSCCKFDEDDSEPVLKGVALAYT

SEQ ID NO: 128 - DNA, 3822 bp, Artificial Sequence
  Synthetic
atgttcgtcttcctcgtgctgctcccactcgtttcttcccagtgtgtcaacctgacaactaggactcagctgccaccagcctacaccaactccttcaccagaggcgtgtattacccagacaaggtgtttagaagcagcgtgctgcactctacccaggacctctttctgccctttttcagcaacgtgacatggtttcacgcaattcacgtgtccggcactaatggcacaaagcggttcgacaatccagtcctgcctttcaacgatggcgtctactttgcatctactgagaaatccaatatcattaggggatggatcttcggcacaaccctggattctaagacccagagcctgctgatcgtcaacaacgccacaaacgtggtcattaaggtttgcgagtttcagttctgtaacgatccttttctgggcgtgtattatcataagaacaataagagctggatggagtccgagtttagagtgtatagctctgcaaataattgtacctttgagtacgtgagccagccctttctgatggacctggagggaaaacaaggaaacttcaaaaacctgcgggaattcgttttcaaaaacatcgacggctatttcaagatctatagcaagcataccccaatcaacctcgtgagggacctcccccagggctttagcgcactggagccactggttgacctgcctatcggcattaatatcacaagatttcagaccctgctggcactgcatagaagctatctgacccctggagactcctctagtgggtggactgccggcgccgctgcctactatgtgggctatctgcagccacggacattcctgctgaaatacaatgagaacgggacaatcacagatgctgttgattgcgcactcgaccccctgtccgagacaaagtgcactctcaagagctttaccgtcgagaagggcatctatcagacctcaaacttcagggtgcagcccacagaatctatcgtgcgcttccctaatatcactaacctgtgtcctttcggtgaagtgttcaacgccaccaggtttgctagcgtgtatgcctggaacaggaagaggatctctaactgcgtcgccgactattccgtgctgtataacagcgcctccttctccacattcaaatgctatggagtgagcccgacaaaactgaacgatctctgctttacaaatgtctacgccgactcttttgtgatcagaggggacgaggtccggcagatcgcaccaggacagacaggcaagattgctgactacaactataagctgcctgacgacttcacaggatgtgtgatcgcatggaactcaaacaatctggactccaaagtcgggggcaactataattacctgtatcgcctgttccggaagtccaacctgaagcccttcgagagggacatcagtacagagatctatcaggctggctccaccccttgcaatggcgtcgaaggctttaattgttattttcccctgcagtcttacgggtttcagcctactaatggagttgggtaccagccatacagagtggtcgtgctcagcttcgagctcctgcatgctccagctacagtttgcgggccaaagaagtccactaacctggtgaagaataagtgcgtcaacttcaactttaacgggctcaccggcaccggcgtgctgactgagagcaacaagaagtttctgccatttcaacagtttggacgggacattgccgacaccaccgatgccgttcgggatccacagaccctggaaattctggacattacaccgtgcagcttcgggggcgtgagcgtgatcacacccggaaccaatacaagcaaccaggttgccgtcctgtatcaggatgtcaattgcacagaagtgccagttgctatccacgcagaccagctgactcccacatggcgggtgtatagcaccggatccaacgtgtttcagacccgcgccggatgtctcattggggccgagcacgtgaataacagctacgagtgcgacatccccattggcgccggcatttgtgcgtcttaccagactcagaccaactctcctagaagggccaggtccgttgctagtcagtctattattgcctataccatgagcctcggagctgagaatagcgtggcctactccaataattccatcgcaatccctactaacttcactatttctgtgaccaccgagatcctgcctgtgtctatgactaagactagcgttgattgtaccatgtatatttgtggcgactctaccgaatgttctaacctgctgcttcagtacggctcattttgcacacagctgaacagagccctgactgggatcgctgtggagcaggacaagaacacacaggaggtgtttgcacaggtgaagcagatctataagacccctcctattaaggatttcggcggattcaatttctcacagattctgccagaccccagtaagccttccaagaggagccctatcgaggatctcctgtttaacaaggtgaccctggcagacgccggctttattaagcaatatggggattgcctgggcgacattgctgccagagacctgatttgcgcccagaaattcaatggcctcacagtgctgccacctctgctgaccgacgagatgatcgctcaatacactagcgcactgctggccggaaccatcacatcaggctggaccttcggggccggaccagcactgcagattccattccctatgcagatggcctatagattcaacggcattggcgtcacacagaacgtgctgtacgaaaaccagaagctcatcgctaaccagtttaattccgcaattggaaagatccaagattcactcagctcaaccccctctgcactcggaaagctgcaggacgtggtcaaccagaatgctcaggccctgaacacactcgtcaagcagctgtcctctaactttggcgctatcagctccgttctgaacgacattctgagccgcctggatcccccagaggctgaagtccagattgaccgcctgattaccggccggctgcagtctctgcaaacatacgtgacccagcagctgatcagagcagccgagatccgggcatccgcaaatctggcagcaactaagatgagcgaatgcgtgctgggccagtccaagcgggtggacttttgtggcaagggctaccacctgatgagcttcccccagagcgccccacatggcgttgtttttctgcacgtgacctatgtccctgctcaggaaaagaactttacaactgctcctgctatctgccatgacggcaaggcccacttcccacgggagggagtgtttgtgtccaatggcacacactggttcgtgacccagaggaacttctatgaaccccagatcatcaccactgacaataccttcgtgtctggaaattgcgacgtcgtgatcggcatcgttaacaacaccgtgtacgaccctctccagccagagctggactcctttaaggaggaactggataagtattttaagaaccacacaagcccagatgtggatctcggggacatctccggaattaacgcctccgtggtgaatatccagaaggagattgaccgcctaaatgaagttgccaagaacctcaatgagtctctgattgatctgcaggaactgggcaagtatgagcagtatatcaaatggccctggtacatttggctggggtttatcgccggactgattgccatcgtcatggtgaccatcatgctgtgttgcatgacctcctgttgttcctgtctgaagggctgctgtagttgcggctcttgctgtaaattcgacgaagatgatagcgagcccgtgctgaagggcgtgaagctgcattatacctga

SEQ ID NO: 129 - protein, 1273 aa, Artificial Sequence
  Synthetic
MFVFLVLLPLVSSQCVNLTTRTQLPPAYTNSFTRGVYYPDKVFRSSVLHSTQDLFLPFFSNVTWFHAIHVSGTNGTKRFDNPVLPFNDGVYFASTEKSNIIRGWIFGTTLDSKTQSLLIVNNATNVVIKVCEFQFCNDPFLGVYYHKNNKSWMESEFRVYSSANNCTFEYVSQPFLMDLEGKQGNFKNLREFVFKNIDGYFKIYSKHTPINLVRDLPQGFSALEPLVDLPIGINITRFQTLLALHRSYLTPGDSSSGWTAGAAAYYVGYLQPRTFLLKYNENGTITDAVDCALDPLSETKCTLKSFTVEKGIYQTSNFRVQPTESIVRFPNITNLCPFGEVFNATRFASVYAWNRKRISNCVADYSVLYNSASFSTFKCYGVSPTKLNDLCFTNVYADSFVIRGDEVRQIAPGQTGKIADYNYKLPDDFTGCVIAWNSNNLDSKVGGNYNYLYRLFRKSNLKPFERDISTEIYQAGSTPCNGVEGFNCYFPLQSYGFQPTNGVGYQPYRVVVLSFELLHAPATVCGPKKSTNLVKNKCVNFNFNGLTGTGVLTESNKKFLPFQQFGRDIADTTDAVRDPQTLEILDITPCSFGGVSVITPGTNTSNQVAVLYQDVNCTEVPVAIHADQLTPTWRVYSTGSNVFQTRAGCLIGAEHVNNSYECDIPIGAGICASYQTQTNSPRRARSVASQSIIAYTMSLGAENSVAYSNNSIAIPTNFTISVTTEILPVSMTKTSVDCTMYICGDSTECSNLLLQYGSFCTQLNRALTGIAVEQDKNTQEVFAQVKQIYKTPPIKDFGGFNFSQILPDPSKPSKRSPIEDLLFNKVTLADAGFIKQYGDCLGDIAARDLICAQKFNGLTVLPPLLTDEMIAQYTSALLAGTITSGWTFGAGPALQIPFPMQMAYRFNGIGVTQNVLYENQKLIANQFNSAIGKIQDSLSSTPSALGKLQDVVNQNAQALNTLVKQLSSNFGAISSVLNDILSRLDPPEAEVQIDRLITGRLQSLQTYVTQQLIRAAEIRASANLAATKMSECVLGQSKRVDFCGKGYHLMSFPQSAPHGVVFLHVTYVPAQEKNFTTAPAICHDGKAHFPREGVFVSNGTHWFVTQRNFYEPQIITTDNTFVSGNCDVVIGIVNNTVYDPLQPELDSFKEELDKYFKNHTSPDVDLGDISGINASVVNIQKEIDRLNEVAKNLNESLIDLQELGKYEQYIKWPWYIWLGFIAGLIAIVMVTIMLCCMTSCCSCLKGCCSCGSCCKFDEDDSEPVLKGVKLHYT

SEQ ID NO: 130 - DNA, 3822 bp, Artificial Sequence
  Synthetic
atgttcgtcttcctcgtgctgctcccactcgtttcttcccagtgtgtcaacctgacaactaggactcagctgccaccagcctacaccaactccttcaccagaggcgtgtattacccagacaaggtgtttagaagcagcgtgctgcactctacccaggacctctttctgccctttttcagcaacgtgacatggtttcacgcaattcacgtgtccggcactaatggcacaaagcggttcgacaatccagtcctgcctttcaacgatggcgtctactttgcatctactgagaaatccaatatcattaggggatggatcttcggcacaaccctggattctaagacccagagcctgctgatcgtcaacaacgccacaaacgtggtcattaaggtttgcgagtttcagttctgtaacgatccttttctgggcgtgtattatcataagaacaataagagctggatggagtccgagtttagagtgtatagctctgcaaataattgtacctttgagtacgtgagccagccctttctgatggacctggagggaaaacaaggaaacttcaaaaacctgcgggaattcgttttcaaaaacatcgacggctatttcaagatctatagcaagcataccccaatcaacctcgtgagggacctcccccagggctttagcgcactggagccactggttgacctgcctatcggcattaatatcacaagatttcagaccctgctggcactgcatagaagctatctgacccctggagactcctctagtgggtggactgccggcgccgctgcctactatgtgggctatctgcagccacggacattcctgctgaaatacaatgagaacgggacaatcacagatgctgttgattgcgcactcgaccccctgtccgagacaaagtgcactctcaagagctttaccgtcgagaagggcatctatcagacctcaaacttcagggtgcagcccacagaatctatcgtgcgcttccctaatatcactaacctgtgtcctttcggtgaagtgttcaacgccaccaggtttgctagcgtgtatgcctggaacaggaagaggatctctaactgcgtcgccgactattccgtgctgtataacagcgcctccttctccacattcaaatgctatggagtgagcccgacaaaactgaacgatctctgctttacaaatgtctacgccgactcttttgtgatcagaggggacgaggtccggcagatcgcaccaggacagacaggcaagattgctgactacaactataagctgcctgacgacttcacaggatgtgtgatcgcatggaactcaaacaatctggactccaaagtcgggggcaactataattacctgtatcgcctgttccggaagtccaacctgaagcccttcgagagggacatcagtacagagatctatcaggctggctccaccccttgcaatggcgtcgaaggctttaattgttattttcccctgcagtcttacgggtttcagcctactaatggagttgggtaccagccatacagagtggtcgtgctcagcttcgagctcctgcatgctccagctacagtttgcgggccaaagaagtccactaacctggtgaagaataagtgcgtcaacttcaactttaacgggctcaccggcaccggcgtgctgactgagagcaacaagaagtttctgccatttcaacagtttggacgggacattgccgacaccaccgatgccgttcgggatccacagaccctggaaattctggacattacaccgtgcagcttcgggggcgtgagcgtgatcacacccggaaccaatacaagcaaccaggttgccgtcctgtatcaggatgtcaattgcacagaagtgccagttgctatccacgcagaccagctgactcccacatggcgggtgtatagcaccggatccaacgtgtttcagacccgcgccggatgtctcattggggccgagcacgtgaataacagctacgagtgcgacatccccattggcgccggcatttgtgcgtcttaccagactcagaccaactctcctggctccgcctcttccgttgctagtcagtctattattgcctataccatgagcctcggagctgagaatagcgtggcctactccaataattccatcgcaatccctactaacttcactatttctgtgaccaccgagatcctgcctgtgtctatgactaagactagcgttgattgtaccatgtatatttgtggcgactctaccgaatgttctaacctgctgcttcagtacggctcattttgcacacagctgaacagagccctgactgggatcgctgtggagcaggacaagaacacacaggaggtgtttgcacaggtgaagcagatctataagacccctcctattaaggatttcggcggattcaatttctcacagattctgccagaccccagtaagccttccaagaggagccctatcgaggatctcctgtttaacaaggtgaccctggcagacgccggctttattaagcaatatggggattgcctgggcgacattgctgccagagacctgatttgcgcccagaaattcaatggcctcacagtgctgccacctctgctgaccgacgagatgatcgctcaatacactagcgcactgctggccggaaccatcacatcaggctggaccttcggggccggaccagcactgcagattccattccctatgcagatggcctatagattcaacggcattggcgtcacacagaacgtgctgtacgaaaaccagaagctcatcgctaaccagtttaattccgcaattggaaagatccaagattcactcagctcaaccccctctgcactcggaaagctgcaggacgtggtcaaccagaatgctcaggccctgaacacactcgtcaagcagctgtcctctaactttggcgctatcagctccgttctgaacgacattctgagccgcctggatcccccagaggctgaagtccagattgaccgcctgattaccggccggctgcagtctctgcaaacatacgtgacccagcagctgatcagagcagccgagatccgggcatccgcaaatctggcagcaactaagatgagcgaatgcgtgctgggccagtccaagcgggtggacttttgtggcaagggctaccacctgatgagcttcccccagagcgccccacatggcgttgtttttctgcacgtgacctatgtccctgctcaggaaaagaactttacaactgctcctgctatctgccatgacggcaaggcccacttcccacgggagggagtgtttgtgtccaatggcacacactggttcgtgacccagaggaacttctatgaaccccagatcatcaccactgacaataccttcgtgtctggaaattgcgacgtcgtgatcggcatcgttaacaacaccgtgtacgaccctctccagccagagctggactcctttaaggaggaactggataagtattttaagaaccacacaagcccagatgtggatctcggggacatctccggaattaacgcctccgtggtgaatatccagaaggagattgaccgcctaaatgaagttgccaagaacctcaatgagtctctgattgatctgcaggaactgggcaagtatgagcagtatatcaaatggccctggtacatttggctggggtttatcgccggactgattgccatcgtcatggtgaccatcatgctgtgttgcatgacctcctgttgttcctgtctgaagggctgctgtagttgcggctcttgctgtaaattcgacgaagatgatagcgagcccgtgctgaagggcgtgaagctgcattatacctga

SEQ ID NO: 131 - protein, 1273 aa, Artificial Sequence
  Synthetic
MFVFLVLLPLVSSQCVNLTTRTQLPPAYTNSFTRGVYYPDKVFRSSVLHSTQDLFLPFFSNVTWFHAIHVSGTNGTKRFDNPVLPFNDGVYFASTEKSNIIRGWIFGTTLDSKTQSLLIVNNATNVVIKVCEFQFCNDPFLGVYYHKNNKSWMESEFRVYSSANNCTFEYVSQPFLMDLEGKQGNFKNLREFVFKNIDGYFKIYSKHTPINLVRDLPQGFSALEPLVDLPIGINITRFQTLLALHRSYLTPGDSSSGWTAGAAAYYVGYLQPRTFLLKYNENGTITDAVDCALDPLSETKCTLKSFTVEKGIYQTSNFRVQPTESIVRFPNITNLCPFGEVFNATRFASVYAWNRKRISNCVADYSVLYNSASFSTFKCYGVSPTKLNDLCFTNVYADSFVIRGDEVRQIAPGQTGKIADYNYKLPDDFTGCVIAWNSNNLDSKVGGNYNYLYRLFRKSNLKPFERDISTEIYQAGSTPCNGVEGFNCYFPLQSYGFQPTNGVGYQPYRVVVLSFELLHAPATVCGPKKSTNLVKNKCVNFNFNGLTGTGVLTESNKKFLPFQQFGRDIADTTDAVRDPQTLEILDITPCSFGGVSVITPGTNTSNQVAVLYQDVNCTEVPVAIHADQLTPTWRVYSTGSNVFQTRAGCLIGAEHVNNSYECDIPIGAGICASYQTQTNSPGSASSVASQSIIAYTMSLGAENSVAYSNNSIAIPTNFTISVTTEILPVSMTKTSVDCTMYICGDSTECSNLLLQYGSFCTQLNRALTGIAVEQDKNTQEVFAQVKQIYKTPPIKDFGGFNFSQILPDPSKPSKRSPIEDLLFNKVTLADAGFIKQYGDCLGDIAARDLICAQKFNGLTVLPPLLTDEMIAQYTSALLAGTITSGWTFGAGPALQIPFPMQMAYRFNGIGVTQNVLYENQKLIANQFNSAIGKIQDSLSSTPSALGKLQDVVNQNAQALNTLVKQLSSNFGAISSVLNDILSRLDPPEAEVQIDRLITGRLQSLQTYVTQQLIRAAEIRASANLAATKMSECVLGQSKRVDFCGKGYHLMSFPQSAPHGVVFLHVTYVPAQEKNFTTAPAICHDGKAHFPREGVFVSNGTHWFVTQRNFYEPQIITTDNTFVSGNCDVVIGIVNNTVYDPLQPELDSFKEELDKYFKNHTSPDVDLGDISGINASVVNIQKEIDRLNEVAKNLNESLIDLQELGKYEQYIKWPWYIWLGFIAGLIAIVMVTIMLCCMTSCCSCLKGCCSCGSCCKFDEDDSEPVLKGVKLHYT

SEQ ID NO: 132 - DNA, 3822 bp, Artificial Sequence
  Synthetic
atgttcgtcttcctcgtgctgctcccactcgtttcttcccagtgtgtcaacctgacaactaggactcagctgccaccagcctacaccaactccttcaccagaggcgtgtattacccagacaaggtgtttagaagcagcgtgctgcactctacccaggacctctttctgccctttttcagcaacgtgacatggtttcacgcaattcacgtgtccggcactaatggcacaaagcggttcgacaatccagtcctgcctttcaacgatggcgtctactttgcatctactgagaaatccaatatcattaggggatggatcttcggcacaaccctggattctaagacccagagcctgctgatcgtcaacaacgccacaaacgtggtcattaaggtttgcgagtttcagttctgtaacgatccttttctgggcgtgtattatcataagaacaataagagctggatggagtccgagtttagagtgtatagctctgcaaataattgtacctttgagtacgtgagccagccctttctgatggacctggagggaaaacaaggaaacttcaaaaacctgcgggaattcgttttcaaaaacatcgacggctatttcaagatctatagcaagcataccccaatcaacctcgtgagggacctcccccagggctttagcgcactggagccactggttgacctgcctatcggcattaatatcacaagatttcagaccctgctggcactgcatagaagctatctgacccctggagactcctctagtgggtggactgccggcgccgctgcctactatgtgggctatctgcagccacggacattcctgctgaaatacaatgagaacgggacaatcacagatgctgttgattgcgcactcgaccccctgtccgagacaaagtgcactctcaagagctttaccgtcgagaagggcatctatcagacctcaaacttcagggtgcagcccacagaatctatcgtgcgcttccctaatatcactaacctgtgtcctttcggtgaagtgttcaacgccaccaggtttgctagcgtgtatgcctggaacaggaagaggatctctaactgcgtcgccgactattccgtgctgtataacagcgcctccttctccacattcaaatgctatggagtgagcccgacaaaactgaacgatctctgctttacaaatgtctacgccgactcttttgtgatcagaggggacgaggtccggcagatcgcaccaggacagacaggcaagattgctgactacaactataagctgcctgacgacttcacaggatgtgtgatcgcatggaactcaaacaatctggactccaaagtcgggggcaactataattacctgtatcgcctgttccggaagtccaacctgaagcccttcgagagggacatcagtacagagatctatcaggctggctccaccccttgcaatggcgtcgaaggctttaattgttattttcccctgcagtcttacgggtttcagcctactaatggagttgggtaccagccatacagagtggtcgtgctcagcttcgagctcctgcatgctccagctacagtttgcgggccaaagaagtccactaacctggtgaagaataagtgcgtcaacttcaactttaacgggctcaccggcaccggcgtgctgactgagagcaacaagaagtttctgccatttcaacagtttggacgggacattgccgacaccaccgatgccgttcgggatccacagaccctggaaattctggacattacaccgtgcagcttcgggggcgtgagcgtgatcacacccggaaccaatacaagcaaccaggttgccgtcctgtatcagggcgtcaattgcacagaagtgccagttgctatccacgcagaccagctgactcccacatggcgggtgtatagcaccggatccaacgtgtttcagacccgcgccggatgtctcattggggccgagcacgtgaataacagctacgagtgcgacatccccattggcgccggcatttgtgcgtcttaccagactcagaccaactctcctagaagggccaggtccgttgctagtcagtctattattgcctataccatgagcctcggagctgagaatagcgtggcctactccaataattccatcgcaatccctactaacttcactatttctgtgaccaccgagatcctgcctgtgtctatgactaagactagcgttgattgtaccatgtatatttgtggcgactctaccgaatgttctaacctgctgcttcagtacggctcattttgcacacagctgaacagagccctgactgggatcgctgtggagcaggacaagaacacacaggaggtgtttgcacaggtgaagcagatctataagacccctcctattaaggatttcggcggattcaatttctcacagattctgccagaccccagtaagccttccaagaggagccctatcgaggatctcctgtttaacaaggtgaccctggcagacgccggctttattaagcaatatggggattgcctgggcgacattgctgccagagacctgatttgcgcccagaaattcaatggcctcacagtgctgccacctctgctgaccgacgagatgatcgctcaatacactagcgcactgctggccggaaccatcacatcaggctggaccttcggggccggaccagcactgcagattccattccctatgcagatggcctatagattcaacggcattggcgtcacacagaacgtgctgtacgaaaaccagaagctcatcgctaaccagtttaattccgcaattggaaagatccaagattcactcagctcaaccccctctgcactcggaaagctgcaggacgtggtcaaccagaatgctcaggccctgaacacactcgtcaagcagctgtcctctaactttggcgctatcagctccgttctgaacgacattctgagccgcctggatcccccagaggctgaagtccagattgaccgcctgattaccggccggctgcagtctctgcaaacatacgtgacccagcagctgatcagagcagccgagatccgggcatccgcaaatctggcagcaactaagatgagcgaatgcgtgctgggccagtccaagcgggtggacttttgtggcaagggctaccacctgatgagcttcccccagagcgccccacatggcgttgtttttctgcacgtgacctatgtccctgctcaggaaaagaactttacaactgctcctgctatctgccatgacggcaaggcccacttcccacgggagggagtgtttgtgtccaatggcacacactggttcgtgacccagaggaacttctatgaaccccagatcatcaccactgacaataccttcgtgtctggaaattgcgacgtcgtgatcggcatcgttaacaacaccgtgtacgaccctctccagccagagctggactcctttaaggaggaactggataagtattttaagaaccacacaagcccagatgtggatctcggggacatctccggaattaacgcctccgtggtgaatatccagaaggagattgaccgcctaaatgaagttgccaagaacctcaatgagtctctgattgatctgcaggaactgggcaagtatgagcagtatatcaaatggccctggtacatttggctggggtttatcgccggactgattgccatcgtcatggtgaccatcatgctgtgttgcatgacctcctgttgttcctgtctgaagggctgctgtagttgcggctcttgctgtaaattcgacgaagatgatagcgagcccgtgctgaagggcgtgaagctgcattatacctga

SEQ ID NO: 133 - protein, 1273 aa, Artificial Sequence
  Synthetic
MFVFLVLLPLVSSQCVNLTTRTQLPPAYTNSFTRGVYYPDKVFRSSVLHSTQDLFLPFFSNVTWFHAIHVSGTNGTKRFDNPVLPFNDGVYFASTEKSNIIRGWIFGTTLDSKTQSLLIVNNATNVVIKVCEFQFCNDPFLGVYYHKNNKSWMESEFRVYSSANNCTFEYVSQPFLMDLEGKQGNFKNLREFVFKNIDGYFKIYSKHTPINLVRDLPQGFSALEPLVDLPIGINITRFQTLLALHRSYLTPGDSSSGWTAGAAAYYVGYLQPRTFLLKYNENGTITDAVDCALDPLSETKCTLKSFTVEKGIYQTSNFRVQPTESIVRFPNITNLCPFGEVFNATRFASVYAWNRKRISNCVADYSVLYNSASFSTFKCYGVSPTKLNDLCFTNVYADSFVIRGDEVRQIAPGQTGKIADYNYKLPDDFTGCVIAWNSNNLDSKVGGNYNYLYRLFRKSNLKPFERDISTEIYQAGSTPCNGVEGFNCYFPLQSYGFQPTNGVGYQPYRVVVLSFELLHAPATVCGPKKSTNLVKNKCVNFNFNGLTGTGVLTESNKKFLPFQQFGRDIADTTDAVRDPQTLEILDITPCSFGGVSVITPGTNTSNQVAVLYQGVNCTEVPVAIHADQLTPTWRVYSTGSNVFQTRAGCLIGAEHVNNSYECDIPIGAGICASYQTQTNSPRRARSVASQSIIAYTMSLGAENSVAYSNNSIAIPTNFTISVTTEILPVSMTKTSVDCTMYICGDSTECSNLLLQYGSFCTQLNRALTGIAVEQDKNTQEVFAQVKQIYKTPPIKDFGGFNFSQILPDPSKPSKRSPIEDLLFNKVTLADAGFIKQYGDCLGDIAARDLICAQKFNGLTVLPPLLTDEMIAQYTSALLAGTITSGWTFGAGPALQIPFPMQMAYRFNGIGVTQNVLYENQKLIANQFNSAIGKIQDSLSSTPSALGKLQDVVNQNAQALNTLVKQLSSNFGAISSVLNDILSRLDPPEAEVQIDRLITGRLQSLQTYVTQQLIRAAEIRASANLAATKMSECVLGQSKRVDFCGKGYHLMSFPQSAPHGVVFLHVTYVPAQEKNFTTAPAICHDGKAHFPREGVFVSNGTHWFVTQRNFYEPQIITTDNTFVSGNCDVVIGIVNNTVYDPLQPELDSFKEELDKYFKNHTSPDVDLGDISGINASVVNIQKEIDRLNEVAKNLNESLIDLQELGKYEQYIKWPWYIWLGFIAGLIAIVMVTIMLCCMTSCCSCLKGCCSCGSCCKFDEDDSEPVLKGVKLHYT

SEQ ID NO: 134 - DNA, 3822 bp, Artificial Sequence
  Synthetic
atgttcgtcttcctcgtgctgctcccactcgtttcttcccagtgtgtcaacctgacaactaggactcagctgccaccagcctacaccaactccttcaccagaggcgtgtattacccagacaaggtgtttagaagcagcgtgctgcactctacccaggacctctttctgccctttttcagcaacgtgacatggtttcacgcaattcacgtgtccggcactaatggcacaaagcggttcgacaatccagtcctgcctttcaacgatggcgtctactttgcatctactgagaaatccaatatcattaggggatggatcttcggcacaaccctggattctaagacccagagcctgctgatcgtcaacaacgccacaaacgtggtcattaaggtttgcgagtttcagttctgtaacgatccttttctgggcgtgtattatcataagaacaataagagctggatggagtccgagtttagagtgtatagctctgcaaataattgtacctttgagtacgtgagccagccctttctgatggacctggagggaaaacaaggaaacttcaaaaacctgcgggaattcgttttcaaaaacatcgacggctatttcaagatctatagcaagcataccccaatcaacctcgtgagggacctcccccagggctttagcgcactggagccactggttgacctgcctatcggcattaatatcacaagatttcagaccctgctggcactgcatagaagctatctgacccctggagactcctctagtgggtggactgccggcgccgctgcctactatgtgggctatctgcagccacggacattcctgctgaaatacaatgagaacgggacaatcacagatgctgttgattgcgcactcgaccccctgtccgagacaaagtgcactctcaagagctttaccgtcgagaagggcatctatcagacctcaaacttcagggtgcagcccacagaatctatcgtgcgcttccctaatatcactaacctgtgtcctttcggtgaagtgttcaacgccaccaggtttgctagcgtgtatgcctggaacaggaagaggatctctaactgcgtcgccgactattccgtgctgtataacagcgcctccttctccacattcaaatgctatggagtgagcccgacaaaactgaacgatctctgctttacaaatgtctacgccgactcttttgtgatcagaggggacgaggtccggcagatcgcaccaggacagacaggcaagattgctgactacaactataagctgcctgacgacttcacaggatgtgtgatcgcatggaactcaaacaatctggactccaaagtcgggggcaactataattacctgtatcgcctgttccggaagtccaacctgaagcccttcgagagggacatcagtacagagatctatcaggctggctccaccccttgcaatggcgtcgaaggctttaattgttattttcccctgcagtcttacgggtttcagcctactaatggagttgggtaccagccatacagagtggtcgtgctcagcttcgagctcctgcatgctccagctacagtttgcgggccaaagaagtccactaacctggtgaagaataagtgcgtcaacttcaactttaacgggctcaccggcaccggcgtgctgactgagagcaacaagaagtttctgccatttcaacagtttggacgggacattgccgacaccaccgatgccgttcgggatccacagaccctggaaattctggacattacaccgtgcagcttcgggggcgtgagcgtgatcacacccggaaccaatacaagcaaccaggttgccgtcctgtatcagggcgtcaattgcacagaagtgccagttgctatccacgcagaccagctgactcccacatggcgggtgtatagcaccggatccaacgtgtttcagacccgcgccggatgtctcattggggccgagcacgtgaataacagctacgagtgcgacatccccattggcgccggcatttgtgcgtcttaccagactcagaccaactctcctggctccgcctcttccgttgctagtcagtctattattgcctataccatgagcctcggagctgagaatagcgtggcctactccaataattccatcgcaatccctactaacttcactatttctgtgaccaccgagatcctgcctgtgtctatgactaagactagcgttgattgtaccatgtatatttgtggcgactctaccgaatgttctaacctgctgcttcagtacggctcattttgcacacagctgaacagagccctgactgggatcgctgtggagcaggacaagaacacacaggaggtgtttgcacaggtgaagcagatctataagacccctcctattaaggatttcggcggattcaatttctcacagattctgccagaccccagtaagccttccaagaggagccctatcgaggatctcctgtttaacaaggtgaccctggcagacgccggctttattaagcaatatggggattgcctgggcgacattgctgccagagacctgatttgcgcccagaaattcaatggcctcacagtgctgccacctctgctgaccgacgagatgatcgctcaatacactagcgcactgctggccggaaccatcacatcaggctggaccttcggggccggaccagcactgcagattccattccctatgcagatggcctatagattcaacggcattggcgtcacacagaacgtgctgtacgaaaaccagaagctcatcgctaaccagtttaattccgcaattggaaagatccaagattcactcagctcaaccccctctgcactcggaaagctgcaggacgtggtcaaccagaatgctcaggccctgaacacactcgtcaagcagctgtcctctaactttggcgctatcagctccgttctgaacgacattctgagccgcctggatcccccagaggctgaagtccagattgaccgcctgattaccggccggctgcagtctctgcaaacatacgtgacccagcagctgatcagagcagccgagatccgggcatccgcaaatctggcagcaactaagatgagcgaatgcgtgctgggccagtccaagcgggtggacttttgtggcaagggctaccacctgatgagcttcccccagagcgccccacatggcgttgtttttctgcacgtgacctatgtccctgctcaggaaaagaactttacaactgctcctgctatctgccatgacggcaaggcccacttcccacgggagggagtgtttgtgtccaatggcacacactggttcgtgacccagaggaacttctatgaaccccagatcatcaccactgacaataccttcgtgtctggaaattgcgacgtcgtgatcggcatcgttaacaacaccgtgtacgaccctctccagccagagctggactcctttaaggaggaactggataagtattttaagaaccacacaagcccagatgtggatctcggggacatctccggaattaacgcctccgtggtgaatatccagaaggagattgaccgcctaaatgaagttgccaagaacctcaatgagtctctgattgatctgcaggaactgggcaagtatgagcagtatatcaaatggccctggtacatttggctggggtttatcgccggactgattgccatcgtcatggtgaccatcatgctgtgttgcatgacctcctgttgttcctgtctgaagggctgctgtagttgcggctcttgctgtaaattcgacgaagatgatagcgagcccgtgctgaagggcgtgaagctgcattatacctga

SEQ ID NO: 135 - protein, 1273 aa, Artificial Sequence
  Synthetic
MFVFLVLLPLVSSQCVNLTTRTQLPPAYTNSFTRGVYYPDKVFRSSVLHSTQDLFLPFFSNVTWFHAIHVSGTNGTKRFDNPVLPFNDGVYFASTEKSNIIRGWIFGTTLDSKTQSLLIVNNATNVVIKVCEFQFCNDPFLGVYYHKNNKSWMESEFRVYSSANNCTFEYVSQPFLMDLEGKQGNFKNLREFVFKNIDGYFKIYSKHTPINLVRDLPQGFSALEPLVDLPIGINITRFQTLLALHRSYLTPGDSSSGWTAGAAAYYVGYLQPRTFLLKYNENGTITDAVDCALDPLSETKCTLKSFTVEKGIYQTSNFRVQPTESIVRFPNITNLCPFGEVFNATRFASVYAWNRKRISNCVADYSVLYNSASFSTFKCYGVSPTKLNDLCFTNVYADSFVIRGDEVRQIAPGQTGKIADYNYKLPDDFTGCVIAWNSNNLDSKVGGNYNYLYRLFRKSNLKPFERDISTEIYQAGSTPCNGVEGFNCYFPLQSYGFQPTNGVGYQPYRVVVLSFELLHAPATVCGPKKSTNLVKNKCVNFNFNGLTGTGVLTESNKKFLPFQQFGRDIADTTDAVRDPQTLEILDITPCSFGGVSVITPGTNTSNQVAVLYQGVNCTEVPVAIHADQLTPTWRVYSTGSNVFQTRAGCLIGAEHVNNSYECDIPIGAGICASYQTQTNSPGSASSVASQSIIAYTMSLGAENSVAYSNNSIAIPTNFTISVTTEILPVSMTKTSVDCTMYICGDSTECSNLLLQYGSFCTQLNRALTGIAVEQDKNTQEVFAQVKQIYKTPPIKDFGGFNFSQILPDPSKPSKRSPIEDLLFNKVTLADAGFIKQYGDCLGDIAARDLICAQKFNGLTVLPPLLTDEMIAQYTSALLAGTITSGWTFGAGPALQIPFPMQMAYRFNGIGVTQNVLYENQKLIANQFNSAIGKIQDSLSSTPSALGKLQDVVNQNAQALNTLVKQLSSNFGAISSVLNDILSRLDPPEAEVQIDRLITGRLQSLQTYVTQQLIRAAEIRASANLAATKMSECVLGQSKRVDFCGKGYHLMSFPQSAPHGVVFLHVTYVPAQEKNFTTAPAICHDGKAHFPREGVFVSNGTHWFVTQRNFYEPQIITTDNTFVSGNCDVVIGIVNNTVYDPLQPELDSFKEELDKYFKNHTSPDVDLGDISGINASVVNIQKEIDRLNEVAKNLNESLIDLQELGKYEQYIKWPWYIWLGFIAGLIAIVMVTIMLCCMTSCCSCLKGCCSCGSCCKFDEDDSEPVLKGVKLHYT

SEQ ID NO: 136 - DNA, 3849 bp, Artificial Sequence
  Synthetic
atgttcctgctgacaacaaaaagaaccatgtttgtgttcctggtgctgctgcctctggtgtcctcacagtgtgtcaacctgacaacaagaactcagctgccaccagcctacaccaactccttcaccagaggcgtgtattacccagacaaggtgtttagaagcagcgtgctgcactctacccaggacctctttctgccctttttcagcaacgtgacatggtttcacgcaattcacgtgtccggcactaatggcacaaagcggttcgacaatccagtcctgcctttcaacgatggcgtctactttgcatctactgagaaatccaatatcattaggggatggatcttcggcacaaccctggattctaagacccagagcctgctgatcgtcaacaacgccacaaacgtggtcattaaggtttgcgagtttcagttctgtaacgatccttttctgggcgtgtattatcataagaacaataagagctggatggagtccgagtttagagtgtatagctctgcaaataattgtacctttgagtacgtgagccagccctttctgatggacctggagggaaaacaaggaaacttcaaaaacctgcgggaattcgttttcaaaaacatcgacggctatttcaagatctatagcaagcataccccaatcaacctcgtgagggacctcccccagggctttagcgcactggagccactggttgacctgcctatcggcattaatatcacaagatttcagaccctgctggcactgcatagaagctatctgacccctggagactcctctagtgggtggactgccggcgccgctgcctactatgtgggctatctgcagccacggacattcctgctgaaatacaatgagaacgggacaatcacagatgctgttgattgcgcactcgaccccctgtccgagacaaagtgcactctcaagagctttaccgtcgagaagggcatctatcagacctcaaacttcagggtgcagcccacagaatctatcgtgcgcttccctaatatcactaacctgtgtcctttcggtgaagtgttcaacgccaccaggtttgctagcgtgtatgcctggaacaggaagaggatctctaactgcgtcgccgactattccgtgctgtataacagcgcctccttctccacattcaaatgctatggagtgagcccgacaaaactgaacgatctctgctttacaaatgtctacgccgactcttttgtgatcagaggggacgaggtccggcagatcgcaccaggacagacaggcaagattgctgactacaactataagctgcctgacgacttcacaggatgtgtgatcgcatggaactcaaacaatctggactccaaagtcgggggcaactataattacctgtatcgcctgttccggaagtccaacctgaagcccttcgagagggacatcagtacagagatctatcaggctggctccaccccttgcaatggcgtcgaaggctttaattgttattttcccctgcagtcttacgggtttcagcctactaatggagttgggtaccagccatacagagtggtcgtgctcagcttcgagctcctgcatgctccagctacagtttgcgggccaaagaagtccactaacctggtgaagaataagtgcgtcaacttcaactttaacgggctcaccggcaccggcgtgctgactgagagcaacaagaagtttctgccatttcaacagtttggacgggacattgccgacaccaccgatgccgttcgggatccacagaccctggaaattctggacattacaccgtgcagcttcgggggcgtgagcgtgatcacacccggaaccaatacaagcaaccaggttgccgtcctgtatcaggatgtcaattgcacagaagtgccagttgctatccacgcagaccagctgactcccacatggcgggtgtatagcaccggatccaacgtgtttcagacccgcgccggatgtctcattggggccgagcacgtgaataacagctacgagtgcgacatccccattggcgccggcatttgtgcgtcttaccagactcagaccaactctcctggctccgcctcttccgttgctagtcagtctattattgcctataccatgagcctcggagctgagaatagcgtggcctactccaataattccatcgcaatccctactaacttcactatttctgtgaccaccgagatcctgcctgtgtctatgactaagactagcgttgattgtaccatgtatatttgtggcgactctaccgaatgttctaacctgctgcttcagtacggctcattttgcacacagctgaacagagccctgactgggatcgctgtggagcaggacaagaacacacaggaggtgtttgcacaggtgaagcagatctataagacccctcctattaaggatttcggcggattcaatttctcacagattctgccagaccccagtaagccttccaagaggagccctatcgaggatctcctgtttaacaaggtgaccctggcagacgccggctttattaagcaatatggggattgcctgggcgacattgctgccagagacctgatttgcgcccagaaattcaatggcctcacagtgctgccacctctgctgaccgacgagatgatcgctcaatacactagcgcactgctggccggaaccatcacatcaggctggaccttcggggccggaccagcactgcagattccattccctatgcagatggcctatagattcaacggcattggcgtcacacagaacgtgctgtacgaaaaccagaagctcatcgctaaccagtttaattccgcaattggaaagatccaagattcactcagctcaaccccctctgcactcggaaagctgcaggacgtggtcaaccagaatgctcaggccctgaacacactcgtcaagcagctgtcctctaactttggcgctatcagctccgttctgaacgacattctgagccgcctggatcccccagaggctgaagtccagattgaccgcctgattaccggccggctgcagtctctgcaaacatacgtgacccagcagctgatcagagcagccgagatccgggcatccgcaaatctggcagcaactaagatgagcgaatgcgtgctgggccagtccaagcgggtggacttttgtggcaagggctaccacctgatgagcttcccccagagcgccccacatggcgttgtttttctgcacgtgacctatgtccctgctcaggaaaagaactttacaactgctcctgctatctgccatgacggcaaggcccacttcccacgggagggagtgtttgtgtccaatggcacacactggttcgtgacccagaggaacttctatgaaccccagatcatcaccactgacaataccttcgtgtctggaaattgcgacgtcgtgatcggcatcgttaacaacaccgtgtacgaccctctccagccagagctggactcctttaaggaggaactggataagtattttaagaaccacacaagcccagatgtggatctcggggacatctccggaattaacgcctccgtggtgaatatccagaaggagattgaccgcctaaatgaagttgccaagaacctcaatgagtctctgattgatctgcaggaactgggcaagtatgagcagtatatcaaatggccctggtacatttggctggggtttatcgccggactgattgccatcgtcatggtgaccatcatgctgtgttgcatgacctcctgttgttcctgtctgaagggctgctgtagttgcggctcttgctgtaaattcgacgaagatgatagcgagcccgtgctgaagggcgtgaagctgcattatacctga

SEQ ID NO: 137 - protein, 1282 aa, Artificial Sequence
  Synthetic
MFLLTTKRTMFVFLVLLPLVSSQCVNLTTRTQLPPAYTNSFTRGVYYPDKVFRSSVLHSTQDLFLPFFSNVTWFHAIHVSGTNGTKRFDNPVLPFNDGVYFASTEKSNIIRGWIFGTTLDSKTQSLLIVNNATNVVIKVCEFQFCNDPFLGVYYHKNNKSWMESEFRVYSSANNCTFEYVSQPFLMDLEGKQGNFKNLREFVFKNIDGYFKIYSKHTPINLVRDLPQGFSALEPLVDLPIGINITRFQTLLALHRSYLTPGDSSSGWTAGAAAYYVGYLQPRTFLLKYNENGTITDAVDCALDPLSETKCTLKSFTVEKGIYQTSNFRVQPTESIVRFPNITNLCPFGEVFNATRFASVYAWNRKRISNCVADYSVLYNSASFSTFKCYGVSPTKLNDLCFTNVYADSFVIRGDEVRQIAPGQTGKIADYNYKLPDDFTGCVIAWNSNNLDSKVGGNYNYLYRLFRKSNLKPFERDISTEIYQAGSTPCNGVEGFNCYFPLQSYGFQPTNGVGYQPYRVVVLSFELLHAPATVCGPKKSTNLVKNKCVNFNFNGLTGTGVLTESNKKFLPFQQFGRDIADTTDAVRDPQTLEILDITPCSFGGVSVITPGTNTSNQVAVLYQDVNCTEVPVAIHADQLTPTWRVYSTGSNVFQTRAGCLIGAEHVNNSYECDIPIGAGICASYQTQTNSPGSASSVASQSIIAYTMSLGAENSVAYSNNSIAIPTNFTISVTTEILPVSMTKTSVDCTMYICGDSTECSNLLLQYGSFCTQLNRALTGIAVEQDKNTQEVFAQVKQIYKTPPIKDFGGFNFSQILPDPSKPSKRSPIEDLLFNKVTLADAGFIKQYGDCLGDIAARDLICAQKFNGLTVLPPLLTDEMIAQYTSALLAGTITSGWTFGAGPALQIPFPMQMAYRFNGIGVTQNVLYENQKLIANQFNSAIGKIQDSLSSTPSALGKLQDVVNQNAQALNTLVKQLSSNFGAISSVLNDILSRLDPPEAEVQIDRLITGRLQSLQTYVTQQLIRAAEIRASANLAATKMSECVLGQSKRVDFCGKGYHLMSFPQSAPHGVVFLHVTYVPAQEKNFTTAPAICHDGKAHFPREGVFVSNGTHWFVTQRNFYEPQIITTDNTFVSGNCDVVIGIVNNTVYDPLQPELDSFKEELDKYFKNHTSPDVDLGDISGINASVVNIQKEIDRLNEVAKNLNESLIDLQELGKYEQYIKWPWYIWLGFIAGLIAIVMVTIMLCCMTSCCSCLKGCCSCGSCCKFDEDDSEPVLKGVKLHYT

SEQ ID NO: 138 - DNA, 3822 bp, Artificial Sequence
  Synthetic
atgttcgtcttcctcgtgctgctcccactcgtttcttcccagtgtgtcaacctgacaactaggactcagctgccaccagcctacaccaactccttcaccagaggcgtgtattacccagacaaggtgtttagaagcagcgtgctgcactctacccaggacctctttctgccctttttcagcaacgtgacatggtttcacgcaattcacgtgtccggcactaatggcacaaagcggttcgacaatccagtcctgcctttcaacgatggcgtctactttgcatctactgagaaatccaatatcattaggggatggatcttcggcacaaccctggattctaagacccagagcctgctgatcgtcaacaacgccacaaacgtggtcattaaggtttgcgagtttcagttctgtaacgatccttttctgggcgtgtattatcataagaacaataagagctggatggagtccgagtttagagtgtatagctctgcaaataattgtacctttgagtacgtgagccagccctttctgatggacctggagggaaaacaaggaaacttcaaaaacctgcgggaattcgttttcaaaaacatcgacggctatttcaagatctatagcaagcataccccaatcaacctcgtgagggacctcccccagggctttagcgcactggagccactggttgacctgcctatcggcattaatatcacaagatttcagaccctgctggcactgcatagaagctatctgacccctggagactcctctagtgggtggactgccggcgccgctgcctactatgtgggctatctgcagccacggacattcctgctgaaatacaatgagaacgggacaatcacagatgctgttgattgcgcactcgaccccctgtccgagacaaagtgcactctcaagagctttaccgtcgagaagggcatctatcagacctcaaacttcagggtgcagcccacagaatctatcgtgcgcttccctaatatcactaacctgtgtcctttcggtgaagtgttcaacgccaccaggtttgctagcgtgtatgcctggaacaggaagaggatctctaactgcgtcgccgactattccgtgctgtataacagcgcctccttctccacattcaaatgctatggagtgagcccgacaaaactgaacgatctctgctttacaaatgtctacgccgactcttttgtgatcagaggggacgaggtccggcagatcgcaccaggacagacaggcaagattgctgactacaactataagctgcctgacgacttcacaggatgtgtgatcgcatggaactcaaacaatctggactccaaagtcgggggcaactataattacctgtatcgcctgttccggaagtccaacctgaagcccttcgagagggacatcagtacagagatctatcaggctggctccaccccttgcaatggcgtcgaaggctttaattgttattttcccctgcagtcttacgggtttcagcctactaatggagttgggtaccagccatacagagtggtcgtgctcagcttcgagctcctgcatgctccagctacagtttgcgggccaaagaagtccactaacctggtgaagaataagtgcgtcaacttcaactttaacgggctcaccggcaccggcgtgctgactgagagcaacaagaagtttctgccatttcaacagtttggacgggacattgccgacaccaccgatgccgttcgggatccacagaccctggaaattctggacattacaccgtgcagcttcgggggcgtgagcgtgatcacacccggaaccaatacaagcaaccaggttgccgtcctgtatcaggatgtcaattgcacagaagtgccagttgctatccacgcagaccagctgactcccacatggcgggtgtatagcaccggatccaacgtgtttcagacccgcgccggatgtctcattggggccgagcacgtgaataacagctacgagtgcgacatccccattggcgccggcatttgtgcgtcttaccagactcagaccaactctcctggctccgcctcttccgttgctagtcagtctattattgcctataccatgagcctcggagctgagaatagcgtggcctactccaataattccatcgcaatccctactaacttcactatttctgtgaccaccgagatcctgcctgtgtctatgactaagactagcgttgattgtaccatgtatatttgtggcgactctaccgaatgttctaacctgctgcttcagtacggctcattttgcacacagctgaacagagccctgactgggatcgctgtggagcaggacaagaacacacaggaggtgtttgcacaggtgaagcagatctataagacccctcctattaaggatttcggcggattcaatttctcacagattctgccagaccccagtaagccttccaagaggagccctatcgaggatctcctgtttaacaaggtgaccctggcagacgccggctttattaagcaatatggggattgcctgggcgacattgctgccagagacctgatttgcgcccagaaattcaatggcctcacagtgctgccacctctgctgaccgacgagatgatcgctcaatacactagcgcactgctggccggaaccatcacatcaggctggaccttcggggccggaccagcactgcagattccattccctatgcagatggcctatagattcaacggcattggcgtcacacagaacgtgctgtacgaaaaccagaagctcatcgctaaccagtttaattccgcaattggaaagatccaagattcactcagctcaaccccctctgcactcggaaagctgcaggacgtggtcaaccagaatgctcaggccctgaacacactcgtcaagcagctgtcctctaactttggcgctatcagctccgttctgaacgacattctgagccgcctggatcccccagaggctgaagtccagattgaccgcctgattaccggccggctgcagtctctgcaaacatacgtgacccagcagctgatcagagcagccgagatccgggcatccgcaaatctggcagcaactaagatgagcgaatgcgtgctgggccagtccaagcgggtggacttttgtggcaagggctaccacctgatgagcttcccccagagcgccccacatggcgttgtttttctgcacgtgacctatgtccctgctcaggaaaagaactttacaactgctcctgctatctgccatgacggcaaggcccacttcccacgggagggagtgtttgtgtccaatggcacacactggttcgtgacccagaggaacttctatgaaccccagatcatcaccactgacaataccttcgtgtctggaaattgcgacgtcgtgatcggcatcgttaacaacaccgtgtacgaccctctccagccagagctggactcctttaaggaggaactggataagtattttaagaaccacacaagcccagatgtggatctcggggacatctccggaattaacgcctccgtggtgaatatccagaaggagattgaccgcctaaatgaagttgccaagaacctcaatgagtctctgattgatctgcaggaactgggcaagtatgagcagtatatcaaatggccctggtacatttggctggggtttatcgccggactgattgccatcgtcatggtgaccatcatgctgtgttgcatgacctcctgttgttcctgtctgaagggctgctgtagttgcggctcttgctgtaaattcgacgaagatgatagcgagcccgtgctgaagggcgtggccctggcttatacctga

SEQ ID NO: 139 - protein, 1273 aa, Artificial Sequence
  Synthetic
MFVFLVLLPLVSSQCVNLTTRTQLPPAYTNSFTRGVYYPDKVFRSSVLHSTQDLFLPFFSNVTWFHAIHVSGTNGTKRFDNPVLPFNDGVYFASTEKSNIIRGWIFGTTLDSKTQSLLIVNNATNVVIKVCEFQFCNDPFLGVYYHKNNKSWMESEFRVYSSANNCTFEYVSQPFLMDLEGKQGNFKNLREFVFKNIDGYFKIYSKHTPINLVRDLPQGFSALEPLVDLPIGINITRFQTLLALHRSYLTPGDSSSGWTAGAAAYYVGYLQPRTFLLKYNENGTITDAVDCALDPLSETKCTLKSFTVEKGIYQTSNFRVQPTESIVRFPNITNLCPFGEVFNATRFASVYAWNRKRISNCVADYSVLYNSASFSTFKCYGVSPTKLNDLCFTNVYADSFVIRGDEVRQIAPGQTGKIADYNYKLPDDFTGCVIAWNSNNLDSKVGGNYNYLYRLFRKSNLKPFERDISTEIYQAGSTPCNGVEGFNCYFPLQSYGFQPTNGVGYQPYRVVVLSFELLHAPATVCGPKKSTNLVKNKCVNFNFNGLTGTGVLTESNKKFLPFQQFGRDIADTTDAVRDPQTLEILDITPCSFGGVSVITPGTNTSNQVAVLYQDVNCTEVPVAIHADQLTPTWRVYSTGSNVFQTRAGCLIGAEHVNNSYECDIPIGAGICASYQTQTNSPGSASSVASQSIIAYTMSLGAENSVAYSNNSIAIPTNFTISVTTEILPVSMTKTSVDCTMYICGDSTECSNLLLQYGSFCTQLNRALTGIAVEQDKNTQEVFAQVKQIYKTPPIKDFGGFNFSQILPDPSKPSKRSPIEDLLFNKVTLADAGFIKQYGDCLGDIAARDLICAQKFNGLTVLPPLLTDEMIAQYTSALLAGTITSGWTFGAGPALQIPFPMQMAYRFNGIGVTQNVLYENQKLIANQFNSAIGKIQDSLSSTPSALGKLQDVVNQNAQALNTLVKQLSSNFGAISSVLNDILSRLDPPEAEVQIDRLITGRLQSLQTYVTQQLIRAAEIRASANLAATKMSECVLGQSKRVDFCGKGYHLMSFPQSAPHGVVFLHVTYVPAQEKNFTTAPAICHDGKAHFPREGVFVSNGTHWFVTQRNFYEPQIITTDNTFVSGNCDVVIGIVNNTVYDPLQPELDSFKEELDKYFKNHTSPDVDLGDISGINASVVNIQKEIDRLNEVAKNLNESLIDLQELGKYEQYIKWPWYIWLGFIAGLIAIVMVTIMLCCMTSCCSCLKGCCSCGSCCKFDEDDSEPVLKGVALAYT

SEQ ID NO: 140 - DNA, 3849 bp, Artificial Sequence
  Synthetic
atgttcctgctgacaacaaaaagaaccatgtttgtgttcctggtgctgctgcctctggtgtcctcacagtgtgtcaacctgacaacaagaactcagctgccaccagcctacaccaactccttcaccagaggcgtgtattacccagacaaggtgtttagaagcagcgtgctgcactctacccaggacctctttctgccctttttcagcaacgtgacatggtttcacgcaattcacgtgtccggcactaatggcacaaagcggttcgacaatccagtcctgcctttcaacgatggcgtctactttgcatctactgagaaatccaatatcattaggggatggatcttcggcacaaccctggattctaagacccagagcctgctgatcgtcaacaacgccacaaacgtggtcattaaggtttgcgagtttcagttctgtaacgatccttttctgggcgtgtattatcataagaacaataagagctggatggagtccgagtttagagtgtatagctctgcaaataattgtacctttgagtacgtgagccagccctttctgatggacctggagggaaaacaaggaaacttcaaaaacctgcgggaattcgttttcaaaaacatcgacggctatttcaagatctatagcaagcataccccaatcaacctcgtgagggacctcccccagggctttagcgcactggagccactggttgacctgcctatcggcattaatatcacaagatttcagaccctgctggcactgcatagaagctatctgacccctggagactcctctagtgggtggactgccggcgccgctgcctactatgtgggctatctgcagccacggacattcctgctgaaatacaatgagaacgggacaatcacagatgctgttgattgcgcactcgaccccctgtccgagacaaagtgcactctcaagagctttaccgtcgagaagggcatctatcagacctcaaacttcagggtgcagcccacagaatctatcgtgcgcttccctaatatcactaacctgtgtcctttcggtgaagtgttcaacgccaccaggtttgctagcgtgtatgcctggaacaggaagaggatctctaactgcgtcgccgactattccgtgctgtataacagcgcctccttctccacattcaaatgctatggagtgagcccgacaaaactgaacgatctctgctttacaaatgtctacgccgactcttttgtgatcagaggggacgaggtccggcagatcgcaccaggacagacaggcaagattgctgactacaactataagctgcctgacgacttcacaggatgtgtgatcgcatggaactcaaacaatctggactccaaagtcgggggcaactataattacctgtatcgcctgttccggaagtccaacctgaagcccttcgagagggacatcagtacagagatctatcaggctggctccaccccttgcaatggcgtcgaaggctttaattgttattttcccctgcagtcttacgggtttcagcctactaatggagttgggtaccagccatacagagtggtcgtgctcagcttcgagctcctgcatgctccagctacagtttgcgggccaaagaagtccactaacctggtgaagaataagtgcgtcaacttcaactttaacgggctcaccggcaccggcgtgctgactgagagcaacaagaagtttctgccatttcaacagtttggacgggacattgccgacaccaccgatgccgttcgggatccacagaccctggaaattctggacattacaccgtgcagcttcgggggcgtgagcgtgatcacacccggaaccaatacaagcaaccaggttgccgtcctgtatcaggatgtcaattgcacagaagtgccagttgctatccacgcagaccagctgactcccacatggcgggtgtatagcaccggatccaacgtgtttcagacccgcgccggatgtctcattggggccgagcacgtgaataacagctacgagtgcgacatccccattggcgccggcatttgtgcgtcttaccagactcagaccaactctcctggctccgcctcttccgttgctagtcagtctattattgcctataccatgagcctcggagctgagaatagcgtggcctactccaataattccatcgcaatccctactaacttcactatttctgtgaccaccgagatcctgcctgtgtctatgactaagactagcgttgattgtaccatgtatatttgtggcgactctaccgaatgttctaacctgctgcttcagtacggctcattttgcacacagctgaacagagccctgactgggatcgctgtggagcaggacaagaacacacaggaggtgtttgcacaggtgaagcagatctataagacccctcctattaaggatttcggcggattcaatttctcacagattctgccagaccccagtaagccttccaagaggagccctatcgaggatctcctgtttaacaaggtgaccctggcagacgccggctttattaagcaatatggggattgcctgggcgacattgctgccagagacctgatttgcgcccagaaattcaatggcctcacagtgctgccacctctgctgaccgacgagatgatcgctcaatacactagcgcactgctggccggaaccatcacatcaggctggaccttcggggccggaccagcactgcagattccattccctatgcagatggcctatagattcaacggcattggcgtcacacagaacgtgctgtacgaaaaccagaagctcatcgctaaccagtttaattccgcaattggaaagatccaagattcactcagctcaaccccctctgcactcggaaagctgcaggacgtggtcaaccagaatgctcaggccctgaacacactcgtcaagcagctgtcctctaactttggcgctatcagctccgttctgaacgacattctgagccgcctggatcccccagaggctgaagtccagattgaccgcctgattaccggccggctgcagtctctgcaaacatacgtgacccagcagctgatcagagcagccgagatccgggcatccgcaaatctggcagcaactaagatgagcgaatgcgtgctgggccagtccaagcgggtggacttttgtggcaagggctaccacctgatgagcttcccccagagcgccccacatggcgttgtttttctgcacgtgacctatgtccctgctcaggaaaagaactttacaactgctcctgctatctgccatgacggcaaggcccacttcccacgggagggagtgtttgtgtccaatggcacacactggttcgtgacccagaggaacttctatgaaccccagatcatcaccactgacaataccttcgtgtctggaaattgcgacgtcgtgatcggcatcgttaacaacaccgtgtacgaccctctccagccagagctggactcctttaaggaggaactggataagtattttaagaaccacacaagcccagatgtggatctcggggacatctccggaattaacgcctccgtggtgaatatccagaaggagattgaccgcctaaatgaagttgccaagaacctcaatgagtctctgattgatctgcaggaactgggcaagtatgagcagtatatcaaatggccctggtacatttggctggggtttatcgccggactgattgccatcgtcatggtgaccatcatgctgtgttgcatgacctcctgttgttcctgtctgaagggctgctgtagttgcggctcttgctgtaaattcgacgaagatgatagcgagcccgtgctgaagggcgtggccctggcttatacctga

SEQ ID NO: 141 - protein, 1282 aa, Artificial Sequence
  Synthetic
MFLLTTKRTMFVFLVLLPLVSSQCVNLTTRTQLPPAYTNSFTRGVYYPDKVFRSSVLHSTQDLFLPFFSNVTWFHAIHVSGTNGTKRFDNPVLPFNDGVYFASTEKSNIIRGWIFGTTLDSKTQSLLIVNNATNVVIKVCEFQFCNDPFLGVYYHKNNKSWMESEFRVYSSANNCTFEYVSQPFLMDLEGKQGNFKNLREFVFKNIDGYFKIYSKHTPINLVRDLPQGFSALEPLVDLPIGINITRFQTLLALHRSYLTPGDSSSGWTAGAAAYYVGYLQPRTFLLKYNENGTITDAVDCALDPLSETKCTLKSFTVEKGIYQTSNFRVQPTESIVRFPNITNLCPFGEVFNATRFASVYAWNRKRISNCVADYSVLYNSASFSTFKCYGVSPTKLNDLCFTNVYADSFVIRGDEVRQIAPGQTGKIADYNYKLPDDFTGCVIAWNSNNLDSKVGGNYNYLYRLFRKSNLKPFERDISTEIYQAGSTPCNGVEGFNCYFPLQSYGFQPTNGVGYQPYRVVVLSFELLHAPATVCGPKKSTNLVKNKCVNFNFNGLTGTGVLTESNKKFLPFQQFGRDIADTTDAVRDPQTLEILDITPCSFGGVSVITPGTNTSNQVAVLYQDVNCTEVPVAIHADQLTPTWRVYSTGSNVFQTRAGCLIGAEHVNNSYECDIPIGAGICASYQTQTNSPGSASSVASQSIIAYTMSLGAENSVAYSNNSIAIPTNFTISVTTEILPVSMTKTSVDCTMYICGDSTECSNLLLQYGSFCTQLNRALTGIAVEQDKNTQEVFAQVKQIYKTPPIKDFGGFNFSQILPDPSKPSKRSPIEDLLFNKVTLADAGFIKQYGDCLGDIAARDLICAQKFNGLTVLPPLLTDEMIAQYTSALLAGTITSGWTFGAGPALQIPFPMQMAYRFNGIGVTQNVLYENQKLIANQFNSAIGKIQDSLSSTPSALGKLQDVVNQNAQALNTLVKQLSSNFGAISSVLNDILSRLDPPEAEVQIDRLITGRLQSLQTYVTQQLIRAAEIRASANLAATKMSECVLGQSKRVDFCGKGYHLMSFPQSAPHGVVFLHVTYVPAQEKNFTTAPAICHDGKAHFPREGVFVSNGTHWFVTQRNFYEPQIITTDNTFVSGNCDVVIGIVNNTVYDPLQPELDSFKEELDKYFKNHTSPDVDLGDISGINASVVNIQKEIDRLNEVAKNLNESLIDLQELGKYEQYIKWPWYIWLGFIAGLIAIVMVTIMLCCMTSCCSCLKGCCSCGSCCKFDEDDSEPVLKGVALAYT

SEQ ID NO: 142 - protein, 24 aa, SARS-COV-2
MFLLTTKRTMFVFLVLLPLVSSQC

SEQ ID NO: 143 - DNA, 72 bp, Artificial Sequence
  Synthetic
atgttcctgctgacaacaaaaagaaccatgtttgtgttcctggtgctgctgcctctggtgtcctcacagtgt

SEQ ID NO: 144 - RNA, 140 nt, Artificial Sequence
  Synthetic
ggacagaucgccuggagacgccauccacgcuguuuugaccuccauagaagacaccgggaccgauccagccuccgcggccgggaacggugcauuggaacgcggauuccccgugccaagagugacucaccguccuugacacg

SEQ ID NO: 145 - RNA, 105 nt, Artificial Sequence
  Synthetic
cggguggcaucccugugaccccuccccagugccucuccuggcccuggaaguugccacuccagugcccaccagccuuguccuaauaaaauuaaguugcaucaagcu

SEQ ID NO: 146 - RNA, 105 nt, Artificial Sequence
  Synthetic
ggguggcaucccugugaccccuccccagugccucuccuggcccuggaaguugccacuccagugcccaccagccuuguccuaauaaaauuaaguugcaucaaagcu

SEQ ID NO: 147 - RNA, 4067 nt, Artificial Sequence
  Synthetic
ggacagaucgccuggagacgccauccacgcuguuuugaccuccauagaagacaccgggaccgauccagccuccgcggccgggaacggugcauuggaacgcggauuccccgugccaagagugacucaccguccuugacacgauguucgucuuccucgugcugcucccacucguuucuucccagugugucaaccugacaacuaggacucagcugccaccagccuacaccaacuccuucaccagaggcguguauuacccagacaagguguuuagaagcagcgugcugcacucuacccaggaccucuuucugcccuuuuucagcaacgugacaugguuucacgcaauucacguguccggcacuaauggcacaaagcgguucgacaauccaguccugccuuucaacgauggcgucuacuuugcaucuacugagaaauccaauaucauuaggggauggaucuucggcacaacccuggauucuaagacccagagccugcugaucgucaacaacgccacaaacguggucauuaagguuugcgaguuucaguucuguaacgauccuuuucugggcguguauuaucauaagaacaauaagagcuggauggaguccgaguuuagaguguauagcucugcaaauaauuguaccuuugaguacgugagccagcccuuucugauggaccuggagggaaaacaaggaaacuucaaaaaccugcgggaauucguuuucaaaaacaucgacggcuauuucaagaucuauagcaagcauaccccaaucaaccucgugagggaccucccccagggcuuuagcgcacuggagccacugguugaccugccuaucggcauuaauaucacaagauuucagacccugcuggcacugcauagaagcuaucugaccccuggagacuccucuaguggguggacugccggcgccgcugccuacuaugugggcuaucugcagccacggacauuccugcugaaauacaaugagaacgggacaaucacagaugcuguugauugcgcacucgacccccuguccgagacaaagugcacucucaagagcuuuaccgucgagaagggcaucuaucagaccucaaacuucagggugcagcccacagaaucuaucgugcgcuucccuaauaucacuaaccuguguccuuucggugaaguguucaacgccaccagguuugcuagcguguaugccuggaacaggaagaggaucucuaacugcgucgccgacuauuccgugcuguauaacagcgccuccuucuccacauucaaaugcuauggagugagcccgacaaaacugaacgaucucugcuuuacaaaugucuacgccgacucuuuugugaucagaggggacgagguccggcagaucgcaccaggacagacaggcaagauugcugacuacaacuauaagcugccugacgacuucacaggaugugugaucgcauggaacucaaacaaucuggacuccaaagucgggggcaacuauaauuaccuguaucgccuguuccggaaguccaaccugaagcccuucgagagggacaucaguacagagaucuaucaggcuggcuccaccccuugcaauggcgucgaaggcuuuaauuguuauuuuccccugcagucuuacggguuucagccuacuaauggaguuggguaccagccauacagaguggucgugcucagcuucgagcuccugcaugcuccagcuacaguuugcgggccaaagaaguccacuaaccuggugaagaauaagugcgucaacuucaacuuuaacgggcucaccggcaccggcgugcugacugagagcaacaagaaguuucugccauuucaacaguuuggacgggacauugccgacaccaccgaugccguucgggauccacagacccuggaaauucuggacauuacaccgugcagcuucgggggcgugagcgugaucacacccggaaccaauacaagcaaccagguugccguccuguaucaggaugucaauugcacagaagugccaguugcuauccacgcagaccagcugacucccacauggcggguguauagcaccggauccaacguguuucagacccgcgccggaugucucauuggggccgagcacgugaauaacagcuacgagugcgacauccccauuggcgccggcauuugugcgucuuaccagacucagaccaacucuccuggcuccgccucuuccguugcuagucagucuauuauugccuauaccaugagccucggagcugagaauagcguggccuacuccaauaauuccaucgcaaucccuacuaacuucacuauuucugugaccaccgagauccugccugugucuaugacuaagacuagcguugauuguaccauguauauuuguggcgacucuaccgaauguucuaaccugcugcuucaguacggcucauuuugcacacagcugaacagagcccugacugggaucgcuguggagcaggacaagaacacacaggagguguuugcacaggugaagcagaucuauaagaccccuccuauuaaggauuucggcggauucaauuucucacagauucugccagaccccaguaagccuuccaagaggagcuucaucgaggaucuccuguuuaacaaggugacccuggcagacgccggcuuuauuaagcaauauggggauugccugggcgacauugcugccagagaccugauuugcgcccagaaauucaauggccucacagugcugccaccucugcugaccgacgagaugaucgcucaauacacuagcgcacugcuggccggaaccaucacaucaggcuggaccuucggggccggagcagcacugcagauuccauucgccaugcagauggccuauagauucaacggcauuggcgucacacagaacgugcuguacgaaaaccagaagcucaucgcuaaccaguuuaauuccgcaauuggaaagauccaagauucacucagcucaaccgccucugcacucggaaagcugcaggacguggucaaccagaaugcucaggcccugaacacacucgucaagcagcuguccucuaacuuuggcgcuaucagcuccguucugaacgacauucugagccgccuggaucccccagaggcugaaguccagauugaccgccugauuaccggccggcugcagucucugcaaacauacgugacccagcagcugaucagagcagccgagauccgggcauccgcaaaucuggcagcaacuaagaugagcgaaugcgugcugggccaguccaagcggguggacuuuuguggcaagggcuaccaccugaugagcuucccccagagcgccccacauggcguuguuuuucugcacgugaccuaugucccugcucaggaaaagaacuuuacaacugcuccugcuaucugccaugacggcaaggcccacuucccacgggagggaguguuuguguccaauggcacacacugguucgugacccagaggaacuucuaugaaccccagaucaucaccacugacaauaccuucgugucuggaaauugcgacgucgugaucggcaucguuaacaacaccguguacgacccucuccagccagagcuggacuccuuuaaggaggaacuggauaaguauuuuaagaaccacacaagcccagauguggaucucggggacaucuccggaauuaacgccuccguggugaauauccagaaggagauugaccgccuaaaugaaguugccaagaaccucaaugagucucugauugaucugcaggaacugggcaaguaugagcaguauaucaaauggcccugguacauuuggcugggguuuaucgccggacugauugccaucgucauggugaccaucaugcuguguugcaugaccuccuguuguuccugucugaagggcugcuguaguugcggcucuugcuguaaauucgacgaagaugauagcgagcccgugcugaagggcgugaagcugcauuauaccugacggguggcaucccugugaccccuccccagugccucuccuggcccuggaaguugccacuccagugcccaccagccuuguccuaauaaaauuaaguugcaucaagcu

SEQ ID NO: 148 - RNA, 3822 nt, Artificial Sequence
  Synthetic
auguucgucuuccucgugcugcucccacucguuucuucccagugugucaaccugacaacuaggacucagcugccaccagccuacaccaacuccuucaccagaggcguguauuacccagacaagguguuuagaagcagcgugcugcacucuacccaggaccucuuucugcccuuuuucagcaacgugacaugguuucacgcaauucacguguccggcacuaauggcacaaagcgguucgacaauccaguccugccuuucaacgauggcgucuacuuugcaucuacugagaaauccaauaucauuaggggauggaucuucggcacaacccuggauucuaagacccagagccugcugaucgucaacaacgccacaaacguggucauuaagguuugcgaguuucaguucuguaacgauccuuuucugggcguguauuaucauaagaacaauaagagcuggauggaguccgaguuuagaguguauagcucugcaaauaauuguaccuuugaguacgugagccagcccuuucugauggaccuggagggaaaacaaggaaacuucaaaaaccugcgggaauucguuuucaaaaacaucgacggcuauuucaagaucuauagcaagcauaccccaaucaaccucgugagggaccucccccagggcuuuagcgcacuggagccacugguugaccugccuaucggcauuaauaucacaagauuucagacccugcuggcacugcauagaagcuaucugaccccuggagacuccucuaguggguggacugccggcgccgcugccuacuaugugggcuaucugcagccacggacauuccugcugaaauacaaugagaacgggacaaucacagaugcuguugauugcgcacucgacccccuguccgagacaaagugcacucucaagagcuuuaccgucgagaagggcaucuaucagaccucaaacuucagggugcagcccacagaaucuaucgugcgcuucccuaauaucacuaaccuguguccuuucggugaaguguucaacgccaccagguuugcuagcguguaugccuggaacaggaagaggaucucuaacugcgucgccgacuauuccgugcuguauaacagcgccuccuucuccacauucaaaugcuauggagugagcccgacaaaacugaacgaucucugcuuuacaaaugucuacgccgacucuuuugugaucagaggggacgagguccggcagaucgcaccaggacagacaggcaagauugcugacuacaacuauaagcugccugacgacuucacaggaugugugaucgcauggaacucaaacaaucuggacuccaaagucgggggcaacuauaauuaccuguaucgccuguuccggaaguccaaccugaagcccuucgagagggacaucaguacagagaucuaucaggcuggcuccaccccuugcaauggcgucgaaggcuuuaauuguuauuuuccccugcagucuuacggguuucagccuacuaauggaguuggguaccagccauacagaguggucgugcucagcuucgagcuccugcaugcuccagcuacaguuugcgggccaaagaaguccacuaaccuggugaagaauaagugcgucaacuucaacuuuaacgggcucaccggcaccggcgugcugacugagagcaacaagaaguuucugccauuucaacaguuuggacgggacauugccgacaccaccgaugccguucgggauccacagacccuggaaauucuggacauuacaccgugcagcuucgggggcgugagcgugaucacacccggaaccaauacaagcaaccagguugccguccuguaucaggaugucaauugcacagaagugccaguugcuauccacgcagaccagcugacucccacauggcggguguauagcaccggauccaacguguuucagacccgcgccggaugucucauuggggccgagcacgugaauaacagcuacgagugcgacauccccauuggcgccggcauuugugcgucuuaccagacucagaccaacucuccuggcuccgccucuuccguugcuagucagucuauuauugccuauaccaugagccucggagcugagaauagcguggccuacuccaauaauuccaucgcaaucccuacuaacuucacuauuucugugaccaccgagauccugccugugucuaugacuaagacuagcguugauuguaccauguauauuuguggcgacucuaccgaauguucuaaccugcugcuucaguacggcucauuuugcacacagcugaacagagcccugacugggaucgcuguggagcaggacaagaacacacaggagguguuugcacaggugaagcagaucuauaagaccccuccuauuaaggauuucggcggauucaauuucucacagauucugccagaccccaguaagccuuccaagaggagcuucaucgaggaucuccuguuuaacaaggugacccuggcagacgccggcuuuauuaagcaauauggggauugccugggcgacauugcugccagagaccugauuugcgcccagaaauucaauggccucacagugcugccaccucugcugaccgacgagaugaucgcucaauacacuagcgcacugcuggccggaaccaucacaucaggcuggaccuucggggccggagcagcacugcagauuccauucgccaugcagauggccuauagauucaacggcauuggcgucacacagaacgugcuguacgaaaaccagaagcucaucgcuaaccaguuuaauuccgcaauuggaaagauccaagauucacucagcucaaccgccucugcacucggaaagcugcaggacguggucaaccagaaugcucaggcccugaacacacucgucaagcagcuguccucuaacuuuggcgcuaucagcuccguucugaacgacauucugagccgccuggaucccccagaggcugaaguccagauugaccgccugauuaccggccggcugcagucucugcaaacauacgugacccagcagcugaucagagcagccgagauccgggcauccgcaaaucuggcagcaacuaagaugagcgaaugcgugcugggccaguccaagcggguggacuuuuguggcaagggcuaccaccugaugagcuucccccagagcgccccacauggcguuguuuuucugcacgugaccuaugucccugcucaggaaaagaacuuuacaacugcuccugcuaucugccaugacggcaaggcccacuucccacgggagggaguguuuguguccaauggcacacacugguucgugacccagaggaacuucuaugaaccccagaucaucaccacugacaauaccuucgugucuggaaauugcgacgucgugaucggcaucguuaacaacaccguguacgacccucuccagccagagcuggacuccuuuaaggaggaacuggauaaguauuuuaagaaccacacaagcccagauguggaucucggggacaucuccggaauuaacgccuccguggugaauauccagaaggagauugaccgccuaaaugaaguugccaagaaccucaaugagucucugauugaucugcaggaacugggcaaguaugagcaguauaucaaauggcccugguacauuuggcugggguuuaucgccggacugauugccaucgucauggugaccaucaugcuguguugcaugaccuccuguuguuccugucugaagggcugcuguaguugcggcucuugcuguaaauucgacgaagaugauagcgagcccgugcugaagggcgugaagcugcauuauaccuga

SEQ ID NO: 149 - DNA, 4067 bp, Artificial Sequence
  Synthetic
ggacagatcgcctggagacgccatccacgctgttttgacctccatagaagacaccgggaccgatccagcctccgcggccgggaacggtgcattggaacgcggattccccgtgccaagagtgactcaccgtccttgacacgatgttcgtcttcctcgtgctgctcccactcgtttcttcccagtgtgtcaacctgacaactaggactcagctgccaccagcctacaccaactccttcaccagaggcgtgtattacccagacaaggtgtttagaagcagcgtgctgcactctacccaggacctctttctgccctttttcagcaacgtgacatggtttcacgcaattcacgtgtccggcactaatggcacaaagcggttcgacaatccagtcctgcctttcaacgatggcgtctactttgcatctactgagaaatccaatatcattaggggatggatcttcggcacaaccctggattctaagacccagagcctgctgatcgtcaacaacgccacaaacgtggtcattaaggtttgcgagtttcagttctgtaacgatccttttctgggcgtgtattatcataagaacaataagagctggatggagtccgagtttagagtgtatagctctgcaaataattgtacctttgagtacgtgagccagccctttctgatggacctggagggaaaacaaggaaacttcaaaaacctgcgggaattcgttttcaaaaacatcgacggctatttcaagatctatagcaagcataccccaatcaacctcgtgagggacctcccccagggctttagcgcactggagccactggttgacctgcctatcggcattaatatcacaagatttcagaccctgctggcactgcatagaagctatctgacccctggagactcctctagtgggtggactgccggcgccgctgcctactatgtgggctatctgcagccacggacattcctgctgaaatacaatgagaacgggacaatcacagatgctgttgattgcgcactcgaccccctgtccgagacaaagtgcactctcaagagctttaccgtcgagaagggcatctatcagacctcaaacttcagggtgcagcccacagaatctatcgtgcgcttccctaatatcactaacctgtgtcctttcggtgaagtgttcaacgccaccaggtttgctagcgtgtatgcctggaacaggaagaggatctctaactgcgtcgccgactattccgtgctgtataacagcgcctccttctccacattcaaatgctatggagtgagcccgacaaaactgaacgatctctgctttacaaatgtctacgccgactcttttgtgatcagaggggacgaggtccggcagatcgcaccaggacagacaggcaagattgctgactacaactataagctgcctgacgacttcacaggatgtgtgatcgcatggaactcaaacaatctggactccaaagtcgggggcaactataattacctgtatcgcctgttccggaagtccaacctgaagcccttcgagagggacatcagtacagagatctatcaggctggctccaccccttgcaatggcgtcgaaggctttaattgttattttcccctgcagtcttacgggtttcagcctactaatggagttgggtaccagccatacagagtggtcgtgctcagcttcgagctcctgcatgctccagctacagtttgcgggccaaagaagtccactaacctggtgaagaataagtgcgtcaacttcaactttaacgggctcaccggcaccggcgtgctgactgagagcaacaagaagtttctgccatttcaacagtttggacgggacattgccgacaccaccgatgccgttcgggatccacagaccctggaaattctggacattacaccgtgcagcttcgggggcgtgagcgtgatcacacccggaaccaatacaagcaaccaggttgccgtcctgtatcaggatgtcaattgcacagaagtgccagttgctatccacgcagaccagctgactcccacatggcgggtgtatagcaccggatccaacgtgtttcagacccgcgccggatgtctcattggggccgagcacgtgaataacagctacgagtgcgacatccccattggcgccggcatttgtgcgtcttaccagactcagaccaactctcctggctccgcctcttccgttgctagtcagtctattattgcctataccatgagcctcggagctgagaatagcgtggcctactccaataattccatcgcaatccctactaacttcactatttctgtgaccaccgagatcctgcctgtgtctatgactaagactagcgttgattgtaccatgtatatttgtggcgactctaccgaatgttctaacctgctgcttcagtacggctcattttgcacacagctgaacagagccctgactgggatcgctgtggagcaggacaagaacacacaggaggtgtttgcacaggtgaagcagatctataagacccctcctattaaggatttcggcggattcaatttctcacagattctgccagaccccagtaagccttccaagaggagcttcatcgaggatctcctgtttaacaaggtgaccctggcagacgccggctttattaagcaatatggggattgcctgggcgacattgctgccagagacctgatttgcgcccagaaattcaatggcctcacagtgctgccacctctgctgaccgacgagatgatcgctcaatacactagcgcactgctggccggaaccatcacatcaggctggaccttcggggccggagcagcactgcagattccattcgccatgcagatggcctatagattcaacggcattggcgtcacacagaacgtgctgtacgaaaaccagaagctcatcgctaaccagtttaattccgcaattggaaagatccaagattcactcagctcaaccgcctctgcactcggaaagctgcaggacgtggtcaaccagaatgctcaggccctgaacacactcgtcaagcagctgtcctctaactttggcgctatcagctccgttctgaacgacattctgagccgcctggatcccccagaggctgaagtccagattgaccgcctgattaccggccggctgcagtctctgcaaacatacgtgacccagcagctgatcagagcagccgagatccgggcatccgcaaatctggcagcaactaagatgagcgaatgcgtgctgggccagtccaagcgggtggacttttgtggcaagggctaccacctgatgagcttcccccagagcgccccacatggcgttgtttttctgcacgtgacctatgtccctgctcaggaaaagaactttacaactgctcctgctatctgccatgacggcaaggcccacttcccacgggagggagtgtttgtgtccaatggcacacactggttcgtgacccagaggaacttctatgaaccccagatcatcaccactgacaataccttcgtgtctggaaattgcgacgtcgtgatcggcatcgttaacaacaccgtgtacgaccctctccagccagagctggactcctttaaggaggaactggataagtattttaagaaccacacaagcccagatgtggatctcggggacatctccggaattaacgcctccgtggtgaatatccagaaggagattgaccgcctaaatgaagttgccaagaacctcaatgagtctctgattgatctgcaggaactgggcaagtatgagcagtatatcaaatggccctggtacatttggctggggtttatcgccggactgattgccatcgtcatggtgaccatcatgctgtgttgcatgacctcctgttgttcctgtctgaagggctgctgtagttgcggctcttgctgtaaattcgacgaagatgatagcgagcccgtgctgaagggcgtgaagctgcattatacctgacgggtggcatccctgtgacccctccccagtgcctctcctggccctggaagttgccactccagtgcccaccagccttgtcctaataaaattaagttgcatcaagct

SEQ ID NO: 150 - DNA, 3813 bp, Artificial Sequence
  Synthetic
atgttcgtcttcctcgtgctgctcccactcgtttcttcccagtgtgtcaacctgacaactaggactcagctgccaccagcctacaccaactccttcaccagaggcgtgtattacccagacaaggtgtttagaagcagcgtgctgcactctacccaggacctctttctgccctttttcagcaacgtgacatggtttcacgcaatttccggcactaatggcacaaagcggttcgacaatccagtcctgcctttcaacgatggcgtctactttgcatctactgagaaatccaatatcattaggggatggatcttcggcacaaccctggattctaagacccagagcctgctgatcgtcaacaacgccacaaacgtggtcattaaggtttgcgagtttcagttctgtaacgatccttttctgggcgtttaccataagaacaataagagctggatggagtccgagtttagagtgtatagctctgcaaataattgtacctttgagtacgtgagccagccctttctgatggacctggagggaaaacaaggaaacttcaaaaacctgcgggaattcgttttcaaaaacatcgacggctatttcaagatctatagcaagcataccccaatcaacctcgtgagggacctcccccagggctttagcgcactggagccactggttgacctgcctatcggcattaatatcacaagatttcagaccctgctggcactgcatagaagctatctgacccctggagactcctctagtgggtggactgccggcgccgctgcctactatgtgggctatctgcagccacggacattcctgctgaaatacaatgagaacgggacaatcacagatgctgttgattgcgcactcgaccccctgtccgagacaaagtgcactctcaagagctttaccgtcgagaagggcatctatcagacctcaaacttcagggtgcagcccacagaatctatcgtgcgcttccctaatatcactaacctgtgtcctttcggtgaagtgttcaacgccaccaggtttgctagcgtgtatgcctggaacaggaagaggatctctaactgcgtcgccgactattccgtgctgtataacagcgcctccttctccacattcaaatgctatggagtgagcccgacaaaactgaacgatctctgctttacaaatgtctacgccgactcttttgtgatcagaggggacgaggtccggcagatcgcaccaggacagacaggcaagattgctgactacaactataagctgcctgacgacttcacaggatgtgtgatcgcatggaactcaaacaatctggactccaaagtcgggggcaactataattacctgtatcgcctgttccggaagtccaacctgaagcccttcgagagggacatcagtacagagatctatcaggctggctccaccccttgcaatggcgtcgaaggctttaattgttattttcccctgcagtcttacgggtttcagcctacttatggagttgggtaccagccatacagagtggtcgtgctcagcttcgagctcctgcatgctccagctacagtttgcgggccaaagaagtccactaacctggtgaagaataagtgcgtcaacttcaactttaacgggctcaccggcaccggcgtgctgactgagagcaacaagaagtttctgccatttcaacagtttggacgggacattgatgacaccaccgatgccgttcgggatccacagaccctggaaattctggacattacaccgtgcagcttcgggggcgtgagcgtgatcacacccggaaccaatacaagcaaccaggttgccgtcctgtatcagggagtcaattgcacagaagtgccagttgctatccacgcagaccagctgactcccacatggcgggtgtatagcaccggatccaacgtgtttcagacccgcgccggatgtctcattggggccgagcacgtgaataacagctacgagtgcgacatccccattggcgccggcatttgtgcgtcttaccagactcagaccaactctcatagaagggccaggtccgttgctagtcagtctattattgcctataccatgagcctcggagctgagaatagcgtggcctactccaataattccatcgcaatccctataaacttcactatttctgtgaccaccgagatcctgcctgtgtctatgactaagactagcgttgattgtaccatgtatatttgtggcgactctaccgaatgttctaacctgctgcttcagtacggctcattttgcacacagctgaacagagccctgactgggatcgctgtggagcaggacaagaacacacaggaggtgtttgcacaggtgaagcagatctataagacccctcctattaaggatttcggcggattcaatttctcacagattctgccagaccccagtaagccttccaagaggagcttcatcgaggatctcctgtttaacaaggtgaccctggcagacgccggctttattaagcaatatggggattgcctgggcgacattgctgccagagacctgatttgcgcccagaaattcaatggcctcacagtgctgccacctctgctgaccgacgagatgatcgctcaatacactagcgcactgctggccggaaccatcacatcaggctggaccttcggggccggagcagcactgcagattccattcgccatgcagatggcctatagattcaacggcattggcgtcacacagaacgtgctgtacgaaaaccagaagctcatcgctaaccagtttaattccgcaattggaaagatccaagattcactcagctcaaccgcctctgcactcggaaagctgcaggacgtggtcaaccagaatgctcaggccctgaacacactcgtcaagcagctgtcctctaactttggcgctatcagctccgttctgaacgacattctggcacgcctggataaggtggaggctgaagtccagattgaccgcctgattaccggccggctgcagtctctgcaaacatacgtgacccagcagctgatcagagcagccgagatccgggcatccgcaaatctggcagcaactaagatgagcgaatgcgtgctgggccagtccaagcgggtggacttttgtggcaagggctaccacctgatgagcttcccccagagcgccccacatggcgttgtttttctgcacgtgacctatgtccctgctcaggaaaagaactttacaactgctcctgctatctgccatgacggcaaggcccacttcccacgggagggagtgtttgtgtccaatggcacacactggttcgtgacccagaggaacttctatgaaccccagatcatcaccactcacaataccttcgtgtctggaaattgcgacgtcgtgatcggcatcgttaacaacaccgtgtacgaccctctccagccagagctggactcctttaaggaggaactggataagtattttaagaaccacacaagcccagatgtggatctcggggacatctccggaattaacgcctccgtggtgaatatccagaaggagattgaccgcctaaatgaagttgccaagaacctcaatgagtctctgattgatctgcaggaactgggcaagtatgagcagtatatcaaatggccctggtacatttggctggggtttatcgccggactgattgccatcgtcatggtgaccatcatgctgtgttgcatgacctcctgttgttcctgtctgaagggctgctgtagttgcggctcttgctgtaaattcgacgaagatgatagcgagcccgtgctgaagggcgtgaagctgcattatacctga

SEQ ID NO: 151 - protein, 1270 aa, Artificial Sequence
  Synthetic
MFVFLVLLPLVSSQCVNLTTRTQLPPAYTNSFTRGVYYPDKVFRSSVLHSTQDLFLPFFSNVTWFHAISGTNGTKRFDNPVLPFNDGVYFASTEKSNIIRGWIFGTTLDSKTQSLLIVNNATNVVIKVCEFQFCNDPFLGVYHKNNKSWMESEFRVYSSANNCTFEYVSQPFLMDLEGKQGNFKNLREFVFKNIDGYFKIYSKHTPINLVRDLPQGFSALEPLVDLPIGINITRFQTLLALHRSYLTPGDSSSGWTAGAAAYYVGYLQPRTFLLKYNENGTITDAVDCALDPLSETKCTLKSFTVEKGIYQTSNFRVQPTESIVRFPNITNLCPFGEVFNATRFASVYAWNRKRISNCVADYSVLYNSASFSTFKCYGVSPTKLNDLCFTNVYADSFVIRGDEVRQIAPGQTGKIADYNYKLPDDFTGCVIAWNSNNLDSKVGGNYNYLYRLFRKSNLKPFERDISTEIYQAGSTPCNGVEGFNCYFPLQSYGFQPTYGVGYQPYRVVVLSFELLHAPATVCGPKKSTNLVKNKCVNFNFNGLTGTGVLTESNKKFLPFQQFGRDIDDTTDAVRDPQTLEILDITPCSFGGVSVITPGTNTSNQVAVLYQGVNCTEVPVAIHADQLTPTWRVYSTGSNVFQTRAGCLIGAEHVNNSYECDIPIGAGICASYQTQTNSHRRARSVASQSIIAYTMSLGAENSVAYSNNSIAIPINFTISVTTEILPVSMTKTSVDCTMYICGDSTECSNLLLQYGSFCTQLNRALTGIAVEQDKNTQEVFAQVKQIYKTPPIKDFGGFNFSQILPDPSKPSKRSFIEDLLFNKVTLADAGFIKQYGDCLGDIAARDLICAQKFNGLTVLPPLLTDEMIAQYTSALLAGTITSGWTFGAGAALQIPFAMQMAYRFNGIGVTQNVLYENQKLIANQFNSAIGKIQDSLSSTASALGKLQDVVNQNAQALNTLVKQLSSNFGAISSVLNDILARLDKVEAEVQIDRLITGRLQSLQTYVTQQLIRAAEIRASANLAATKMSECVLGQSKRVDFCGKGYHLMSFPQSAPHGVVFLHVTYVPAQEKNFTTAPAICHDGKAHFPREGVFVSNGTHWFVTQRNFYEPQIITTHNTFVSGNCDVVIGIVNNTVYDPLQPELDSFKEELDKYFKNHTSPDVDLGDISGINASVVNIQKEIDRLNEVAKNLNESLIDLQELGKYEQYIKWPWYIWLGFIAGLIAIVMVTIMLCCMTSCCSCLKGCCSCGSCCKFDEDDSEPVLKGVKLHYT

SEQ ID NO: 152 - DNA, 3813 bp, Artificial Sequence
  Synthetic
atgttcgtcttcctcgtgctgctcccactcgtttcttcccagtgtgtcaacctgacaactaggactcagctgccaccagcctacaccaactccttcaccagaggcgtgtattacccagacaaggtgtttagaagcagcgtgctgcactctacccaggacctctttctgccctttttcagcaacgtgacatggtttcacgcaatttccggcactaatggcacaaagcggttcgacaatccagtcctgcctttcaacgatggcgtctactttgcatctactgagaaatccaatatcattaggggatggatcttcggcacaaccctggattctaagacccagagcctgctgatcgtcaacaacgccacaaacgtggtcattaaggtttgcgagtttcagttctgtaacgatccttttctgggcgtttaccataagaacaataagagctggatggagtccgagtttagagtgtatagctctgcaaataattgtacctttgagtacgtgagccagccctttctgatggacctggagggaaaacaaggaaacttcaaaaacctgcgggaattcgttttcaaaaacatcgacggctatttcaagatctatagcaagcataccccaatcaacctcgtgagggacctcccccagggctttagcgcactggagccactggttgacctgcctatcggcattaatatcacaagatttcagaccctgctggcactgcatagaagctatctgacccctggagactcctctagtgggtggactgccggcgccgctgcctactatgtgggctatctgcagccacggacattcctgctgaaatacaatgagaacgggacaatcacagatgctgttgattgcgcactcgaccccctgtccgagacaaagtgcactctcaagagctttaccgtcgagaagggcatctatcagacctcaaacttcagggtgcagcccacagaatctatcgtgcgcttccctaatatcactaacctgtgtcctttcggtgaagtgttcaacgccaccaggtttgctagcgtgtatgcctggaacaggaagaggatctctaactgcgtcgccgactattccgtgctgtataacagcgcctccttctccacattcaaatgctatggagtgagcccgacaaaactgaacgatctctgctttacaaatgtctacgccgactcttttgtgatcagaggggacgaggtccggcagatcgcaccaggacagacaggcaagattgctgactacaactataagctgcctgacgacttcacaggatgtgtgatcgcatggaactcaaacaatctggactccaaagtcgggggcaactataattacctgtatcgcctgttccggaagtccaacctgaagcccttcgagagggacatcagtacagagatctatcaggctggctccaccccttgcaatggcgtcgaaggctttaattgttattttcccctgcagtcttacgggtttcagcctacttatggagttgggtaccagccatacagagtggtcgtgctcagcttcgagctcctgcatgctccagctacagtttgcgggccaaagaagtccactaacctggtgaagaataagtgcgtcaacttcaactttaacgggctcaccggcaccggcgtgctgactgagagcaacaagaagtttctgccatttcaacagtttggacgggacattgatgacaccaccgatgccgttcgggatccacagaccctggaaattctggacattacaccgtgcagcttcgggggcgtgagcgtgatcacacccggaaccaatacaagcaaccaggttgccgtcctgtatcagggagtcaattgcacagaagtgccagttgctatccacgcagaccagctgactcccacatggcgggtgtatagcaccggatccaacgtgtttcagacccgcgccggatgtctcattggggccgagcacgtgaataacagctacgagtgcgacatccccattggcgccggcatttgtgcgtcttaccagactcagaccaactctcatagaagggccaggtccgttgctagtcagtctattattgcctataccatgagcctcggagctgagaatagcgtggcctactccaataattccatcgcaatccctataaacttcactatttctgtgaccaccgagatcctgcctgtgtctatgactaagactagcgttgattgtaccatgtatatttgtggcgactctaccgaatgttctaacctgctgcttcagtacggctcattttgcacacagctgaacagagccctgactgggatcgctgtggagcaggacaagaacacacaggaggtgtttgcacaggtgaagcagatctataagacccctcctattaaggatttcggcggattcaatttctcacagattctgccagaccccagtaagccttccaagaggagcttcatcgaggatctcctgtttaacaaggtgaccctggcagacgccggctttattaagcaatatggggattgcctgggcgacattgctgccagagacctgatttgcgcccagaaattcaatggcctcacagtgctgccacctctgctgaccgacgagatgatcgctcaatacactagcgcactgctggccggaaccatcacatcaggctggaccttcggggccggagcagcactgcagattccattcgccatgcagatggcctatagattcaacggcattggcgtcacacagaacgtgctgtacgaaaaccagaagctcatcgctaaccagtttaattccgcaattggaaagatccaagattcactcagctcaaccgcctctgcactcggaaagctgcaggacgtggtcaaccagaatgctcaggccctgaacacactcgtcaagcagctgtcctctaactttggcgctatcagctccgttctgaacgacattctggcacgcctggatcccccagaggctgaagtccagattgaccgcctgattaccggccggctgcagtctctgcaaacatacgtgacccagcagctgatcagagcagccgagatccgggcatccgcaaatctggcagcaactaagatgagcgaatgcgtgctgggccagtccaagcgggtggacttttgtggcaagggctaccacctgatgagcttcccccagagcgccccacatggcgttgtttttctgcacgtgacctatgtccctgctcaggaaaagaactttacaactgctcctgctatctgccatgacggcaaggcccacttcccacgggagggagtgtttgtgtccaatggcacacactggttcgtgacccagaggaacttctatgaaccccagatcatcaccactcacaataccttcgtgtctggaaattgcgacgtcgtgatcggcatcgttaacaacaccgtgtacgaccctctccagccagagctggactcctttaaggaggaactggataagtattttaagaaccacacaagcccagatgtggatctcggggacatctccggaattaacgcctccgtggtgaatatccagaaggagattgaccgcctaaatgaagttgccaagaacctcaatgagtctctgattgatctgcaggaactgggcaagtatgagcagtatatcaaatggccctggtacatttggctggggtttatcgccggactgattgccatcgtcatggtgaccatcatgctgtgttgcatgacctcctgttgttcctgtctgaagggctgctgtagttgcggctcttgctgtaaattcgacgaagatgatagcgagcccgtgctgaagggcgtgaagctgcattatacctga

SEQ ID NO: 153 - protein, 1270 aa, Artificial Sequence
  Synthetic
MFVFLVLLPLVSSQCVNLTTRTQLPPAYTNSFTRGVYYPDKVFRSSVLHSTQDLFLPFFSNVTWFHAISGTNGTKRFDNPVLPFNDGVYFASTEKSNIIRGWIFGTTLDSKTQSLLIVNNATNVVIKVCEFQFCNDPFLGVYHKNNKSWMESEFRVYSSANNCTFEYVSQPFLMDLEGKQGNFKNLREFVFKNIDGYFKIYSKHTPINLVRDLPQGFSALEPLVDLPIGINITRFQTLLALHRSYLTPGDSSSGWTAGAAAYYVGYLQPRTFLLKYNENGTITDAVDCALDPLSETKCTLKSFTVEKGIYQTSNFRVQPTESIVRFPNITNLCPFGEVFNATRFASVYAWNRKRISNCVADYSVLYNSASFSTFKCYGVSPTKLNDLCFTNVYADSFVIRGDEVRQIAPGQTGKIADYNYKLPDDFTGCVIAWNSNNLDSKVGGNYNYLYRLFRKSNLKPFERDISTEIYQAGSTPCNGVEGFNCYFPLQSYGFQPTYGVGYQPYRVVVLSFELLHAPATVCGPKKSTNLVKNKCVNFNFNGLTGTGVLTESNKKFLPFQQFGRDIDDTTDAVRDPQTLEILDITPCSFGGVSVITPGTNTSNQVAVLYQGVNCTEVPVAIHADQLTPTWRVYSTGSNVFQTRAGCLIGAEHVNNSYECDIPIGAGICASYQTQTNSHRRARSVASQSIIAYTMSLGAENSVAYSNNSIAIPINFTISVTTEILPVSMTKTSVDCTMYICGDSTECSNLLLQYGSFCTQLNRALTGIAVEQDKNTQEVFAQVKQIYKTPPIKDFGGFNFSQILPDPSKPSKRSFIEDLLFNKVTLADAGFIKQYGDCLGDIAARDLICAQKFNGLTVLPPLLTDEMIAQYTSALLAGTITSGWTFGAGAALQIPFAMQMAYRFNGIGVTQNVLYENQKLIANQFNSAIGKIQDSLSSTASALGKLQDVVNQNAQALNTLVKQLSSNFGAISSVLNDILARLDPPEAEVQIDRLITGRLQSLQTYVTQQLIRAAEIRASANLAATKMSECVLGQSKRVDFCGKGYHLMSFPQSAPHGVVFLHVTYVPAQEKNFTTAPAICHDGKAHFPREGVFVSNGTHWFVTQRNFYEPQIITTHNTFVSGNCDVVIGIVNNTVYDPLQPELDSFKEELDKYFKNHTSPDVDLGDISGINASVVNIQKEIDRLNEVAKNLNESLIDLQELGKYEQYIKWPWYIWLGFIAGLIAIVMVTIMLCCMTSCCSCLKGCCSCGSCCKFDEDDSEPVLKGVKLHYT

SEQ ID NO: 154 - DNA, 3813 bp, Artificial Sequence
  Synthetic
atgttcgtcttcctcgtgctgctcccactcgtttcttcccagtgtgtcaacctgacaactaggactcagctgccaccagcctacaccaactccttcaccagaggcgtgtattacccagacaaggtgtttagaagcagcgtgctgcactctacccaggacctctttctgccctttttcagcaacgtgacatggtttcacgcaatttccggcactaatggcacaaagcggttcgacaatccagtcctgcctttcaacgatggcgtctactttgcatctactgagaaatccaatatcattaggggatggatcttcggcacaaccctggattctaagacccagagcctgctgatcgtcaacaacgccacaaacgtggtcattaaggtttgcgagtttcagttctgtaacgatccttttctgggcgtttaccataagaacaataagagctggatggagtccgagtttagagtgtatagctctgcaaataattgtacctttgagtacgtgagccagccctttctgatggacctggagggaaaacaaggaaacttcaaaaacctgcgggaattcgttttcaaaaacatcgacggctatttcaagatctatagcaagcataccccaatcaacctcgtgagggacctcccccagggctttagcgcactggagccactggttgacctgcctatcggcattaatatcacaagatttcagaccctgctggcactgcatagaagctatctgacccctggagactcctctagtgggtggactgccggcgccgctgcctactatgtgggctatctgcagccacggacattcctgctgaaatacaatgagaacgggacaatcacagatgctgttgattgcgcactcgaccccctgtccgagacaaagtgcactctcaagagctttaccgtcgagaagggcatctatcagacctcaaacttcagggtgcagcccacagaatctatcgtgcgcttccctaatatcactaacctgtgtcctttcggtgaagtgttcaacgccaccaggtttgctagcgtgtatgcctggaacaggaagaggatctctaactgcgtcgccgactattccgtgctgtataacagcgcctccttctccacattcaaatgctatggagtgagcccgacaaaactgaacgatctctgctttacaaatgtctacgccgactcttttgtgatcagaggggacgaggtccggcagatcgcaccaggacagacaggcaagattgctgactacaactataagctgcctgacgacttcacaggatgtgtgatcgcatggaactcaaacaatctggactccaaagtcgggggcaactataattacctgtatcgcctgttccggaagtccaacctgaagcccttcgagagggacatcagtacagagatctatcaggctggctccaccccttgcaatggcgtcgaaggctttaattgttattttcccctgcagtcttacgggtttcagcctacttatggagttgggtaccagccatacagagtggtcgtgctcagcttcgagctcctgcatgctccagctacagtttgcgggccaaagaagtccactaacctggtgaagaataagtgcgtcaacttcaactttaacgggctcaccggcaccggcgtgctgactgagagcaacaagaagtttctgccatttcaacagtttggacgggacattgatgacaccaccgatgccgttcgggatccacagaccctggaaattctggacattacaccgtgcagcttcgggggcgtgagcgtgatcacacccggaaccaatacaagcaaccaggttgccgtcctgtatcagggagtcaattgcacagaagtgccagttgctatccacgcagaccagctgactcccacatggcgggtgtatagcaccggatccaacgtgtttcagacccgcgccggatgtctcattggggccgagcacgtgaataacagctacgagtgcgacatccccattggcgccggcatttgtgcgtcttaccagactcagaccaactctcatggctccgcctcttccgttgctagtcagtctattattgcctataccatgagcctcggagctgagaatagcgtggcctactccaataattccatcgcaatccctataaacttcactatttctgtgaccaccgagatcctgcctgtgtctatgactaagactagcgttgattgtaccatgtatatttgtggcgactctaccgaatgttctaacctgctgcttcagtacggctcattttgcacacagctgaacagagccctgactgggatcgctgtggagcaggacaagaacacacaggaggtgtttgcacaggtgaagcagatctataagacccctcctattaaggatttcggcggattcaatttctcacagattctgccagaccccagtaagccttccaagaggagcttcatcgaggatctcctgtttaacaaggtgaccctggcagacgccggctttattaagcaatatggggattgcctgggcgacattgctgccagagacctgatttgcgcccagaaattcaatggcctcacagtgctgccacctctgctgaccgacgagatgatcgctcaatacactagcgcactgctggccggaaccatcacatcaggctggaccttcggggccggagcagcactgcagattccattcgccatgcagatggcctatagattcaacggcattggcgtcacacagaacgtgctgtacgaaaaccagaagctcatcgctaaccagtttaattccgcaattggaaagatccaagattcactcagctcaaccgcctctgcactcggaaagctgcaggacgtggtcaaccagaatgctcaggccctgaacacactcgtcaagcagctgtcctctaactttggcgctatcagctccgttctgaacgacattctggcacgcctggataaggtggaggctgaagtccagattgaccgcctgattaccggccggctgcagtctctgcaaacatacgtgacccagcagctgatcagagcagccgagatccgggcatccgcaaatctggcagcaactaagatgagcgaatgcgtgctgggccagtccaagcgggtggacttttgtggcaagggctaccacctgatgagcttcccccagagcgccccacatggcgttgtttttctgcacgtgacctatgtccctgctcaggaaaagaactttacaactgctcctgctatctgccatgacggcaaggcccacttcccacgggagggagtgtttgtgtccaatggcacacactggttcgtgacccagaggaacttctatgaaccccagatcatcaccactcacaataccttcgtgtctggaaattgcgacgtcgtgatcggcatcgttaacaacaccgtgtacgaccctctccagccagagctggactcctttaaggaggaactggataagtattttaagaaccacacaagcccagatgtggatctcggggacatctccggaattaacgcctccgtggtgaatatccagaaggagattgaccgcctaaatgaagttgccaagaacctcaatgagtctctgattgatctgcaggaactgggcaagtatgagcagtatatcaaatggccctggtacatttggctggggtttatcgccggactgattgccatcgtcatggtgaccatcatgctgtgttgcatgacctcctgttgttcctgtctgaagggctgctgtagttgcggctcttgctgtaaattcgacgaagatgatagcgagcccgtgctgaagggcgtgaagctgcattatacctga

SEQ ID NO: 155 - protein, 1270 aa, Artificial Sequence
  Synthetic
MFVFLVLLPLVSSQCVNLTTRTQLPPAYTNSFTRGVYYPDKVFRSSVLHSTQDLFLPFFSNVTWFHAISGTNGTKRFDNPVLPFNDGVYFASTEKSNIIRGWIFGTTLDSKTQSLLIVNNATNVVIKVCEFQFCNDPFLGVYHKNNKSWMESEFRVYSSANNCTFEYVSQPFLMDLEGKQGNFKNLREFVFKNIDGYFKIYSKHTPINLVRDLPQGFSALEPLVDLPIGINITRFQTLLALHRSYLTPGDSSSGWTAGAAAYYVGYLQPRTFLLKYNENGTITDAVDCALDPLSETKCTLKSFTVEKGIYQTSNFRVQPTESIVRFPNITNLCPFGEVFNATRFASVYAWNRKRISNCVADYSVLYNSASFSTFKCYGVSPTKLNDLCFTNVYADSFVIRGDEVRQIAPGQTGKIADYNYKLPDDFTGCVIAWNSNNLDSKVGGNYNYLYRLFRKSNLKPFERDISTEIYQAGSTPCNGVEGFNCYFPLQSYGFQPTYGVGYQPYRVVVLSFELLHAPATVCGPKKSTNLVKNKCVNFNFNGLTGTGVLTESNKKFLPFQQFGRDIDDTTDAVRDPQTLEILDITPCSFGGVSVITPGTNTSNQVAVLYQGVNCTEVPVAIHADQLTPTWRVYSTGSNVFQTRAGCLIGAEHVNNSYECDIPIGAGICASYQTQTNSHGSASSVASQSIIAYTMSLGAENSVAYSNNSIAIPINFTISVTTEILPVSMTKTSVDCTMYICGDSTECSNLLLQYGSFCTQLNRALTGIAVEQDKNTQEVFAQVKQIYKTPPIKDFGGFNFSQILPDPSKPSKRSFIEDLLFNKVTLADAGFIKQYGDCLGDIAARDLICAQKFNGLTVLPPLLTDEMIAQYTSALLAGTITSGWTFGAGAALQIPFAMQMAYRFNGIGVTQNVLYENQKLIANQFNSAIGKIQDSLSSTASALGKLQDVVNQNAQALNTLVKQLSSNFGAISSVLNDILARLDKVEAEVQIDRLITGRLQSLQTYVTQQLIRAAEIRASANLAATKMSECVLGQSKRVDFCGKGYHLMSFPQSAPHGVVFLHVTYVPAQEKNFTTAPAICHDGKAHFPREGVFVSNGTHWFVTQRNFYEPQIITTHNTFVSGNCDVVIGIVNNTVYDPLQPELDSFKEELDKYFKNHTSPDVDLGDISGINASVVNIQKEIDRLNEVAKNLNESLIDLQELGKYEQYIKWPWYIWLGFIAGLIAIVMVTIMLCCMTSCCSCLKGCCSCGSCCKFDEDDSEPVLKGVKLHYT

SEQ ID NO: 156 - DNA, 3813 bp, Artificial Sequence
  Synthetic
atgttcgtcttcctcgtgctgctcccactcgtttcttcccagtgtgtcaacctgacaactaggactcagctgccaccagcctacaccaactccttcaccagaggcgtgtattacccagacaaggtgtttagaagcagcgtgctgcactctacccaggacctctttctgccctttttcagcaacgtgacatggtttcacgcaatttccggcactaatggcacaaagcggttcgacaatccagtcctgcctttcaacgatggcgtctactttgcatctactgagaaatccaatatcattaggggatggatcttcggcacaaccctggattctaagacccagagcctgctgatcgtcaacaacgccacaaacgtggtcattaaggtttgcgagtttcagttctgtaacgatccttttctgggcgtttaccataagaacaataagagctggatggagtccgagtttagagtgtatagctctgcaaataattgtacctttgagtacgtgagccagccctttctgatggacctggagggaaaacaaggaaacttcaaaaacctgcgggaattcgttttcaaaaacatcgacggctatttcaagatctatagcaagcataccccaatcaacctcgtgagggacctcccccagggctttagcgcactggagccactggttgacctgcctatcggcattaatatcacaagatttcagaccctgctggcactgcatagaagctatctgacccctggagactcctctagtgggtggactgccggcgccgctgcctactatgtgggctatctgcagccacggacattcctgctgaaatacaatgagaacgggacaatcacagatgctgttgattgcgcactcgaccccctgtccgagacaaagtgcactctcaagagctttaccgtcgagaagggcatctatcagacctcaaacttcagggtgcagcccacagaatctatcgtgcgcttccctaatatcactaacctgtgtcctttcggtgaagtgttcaacgccaccaggtttgctagcgtgtatgcctggaacaggaagaggatctctaactgcgtcgccgactattccgtgctgtataacagcgcctccttctccacattcaaatgctatggagtgagcccgacaaaactgaacgatctctgctttacaaatgtctacgccgactcttttgtgatcagaggggacgaggtccggcagatcgcaccaggacagacaggcaagattgctgactacaactataagctgcctgacgacttcacaggatgtgtgatcgcatggaactcaaacaatctggactccaaagtcgggggcaactataattacctgtatcgcctgttccggaagtccaacctgaagcccttcgagagggacatcagtacagagatctatcaggctggctccaccccttgcaatggcgtcgaaggctttaattgttattttcccctgcagtcttacgggtttcagcctacttatggagttgggtaccagccatacagagtggtcgtgctcagcttcgagctcctgcatgctccagctacagtttgcgggccaaagaagtccactaacctggtgaagaataagtgcgtcaacttcaactttaacgggctcaccggcaccggcgtgctgactgagagcaacaagaagtttctgccatttcaacagtttggacgggacattgatgacaccaccgatgccgttcgggatccacagaccctggaaattctggacattacaccgtgcagcttcgggggcgtgagcgtgatcacacccggaaccaatacaagcaaccaggttgccgtcctgtatcagggagtcaattgcacagaagtgccagttgctatccacgcagaccagctgactcccacatggcgggtgtatagcaccggatccaacgtgtttcagacccgcgccggatgtctcattggggccgagcacgtgaataacagctacgagtgcgacatccccattggcgccggcatttgtgcgtcttaccagactcagaccaactctcatggctccgcctcttccgttgctagtcagtctattattgcctataccatgagcctcggagctgagaatagcgtggcctactccaataattccatcgcaatccctataaacttcactatttctgtgaccaccgagatcctgcctgtgtctatgactaagactagcgttgattgtaccatgtatatttgtggcgactctaccgaatgttctaacctgctgcttcagtacggctcattttgcacacagctgaacagagccctgactgggatcgctgtggagcaggacaagaacacacaggaggtgtttgcacaggtgaagcagatctataagacccctcctattaaggatttcggcggattcaatttctcacagattctgccagaccccagtaagccttccaagaggagcttcatcgaggatctcctgtttaacaaggtgaccctggcagacgccggctttattaagcaatatggggattgcctgggcgacattgctgccagagacctgatttgcgcccagaaattcaatggcctcacagtgctgccacctctgctgaccgacgagatgatcgctcaatacactagcgcactgctggccggaaccatcacatcaggctggaccttcggggccggagcagcactgcagattccattcgccatgcagatggcctatagattcaacggcattggcgtcacacagaacgtgctgtacgaaaaccagaagctcatcgctaaccagtttaattccgcaattggaaagatccaagattcactcagctcaaccgcctctgcactcggaaagctgcaggacgtggtcaaccagaatgctcaggccctgaacacactcgtcaagcagctgtcctctaactttggcgctatcagctccgttctgaacgacattctggcacgcctggatcccccagaggctgaagtccagattgaccgcctgattaccggccggctgcagtctctgcaaacatacgtgacccagcagctgatcagagcagccgagatccgggcatccgcaaatctggcagcaactaagatgagcgaatgcgtgctgggccagtccaagcgggtggacttttgtggcaagggctaccacctgatgagcttcccccagagcgccccacatggcgttgtttttctgcacgtgacctatgtccctgctcaggaaaagaactttacaactgctcctgctatctgccatgacggcaaggcccacttcccacgggagggagtgtttgtgtccaatggcacacactggttcgtgacccagaggaacttctatgaaccccagatcatcaccactcacaataccttcgtgtctggaaattgcgacgtcgtgatcggcatcgttaacaacaccgtgtacgaccctctccagccagagctggactcctttaaggaggaactggataagtattttaagaaccacacaagcccagatgtggatctcggggacatctccggaattaacgcctccgtggtgaatatccagaaggagattgaccgcctaaatgaagttgccaagaacctcaatgagtctctgattgatctgcaggaactgggcaagtatgagcagtatatcaaatggccctggtacatttggctggggtttatcgccggactgattgccatcgtcatggtgaccatcatgctgtgttgcatgacctcctgttgttcctgtctgaagggctgctgtagttgcggctcttgctgtaaattcgacgaagatgatagcgagcccgtgctgaagggcgtgaagctgcattatacctga

SEQ ID NO: 157 - protein, 1270 aa, Artificial Sequence
  Synthetic
MFVFLVLLPLVSSQCVNLTTRTQLPPAYTNSFTRGVYYPDKVFRSSVLHSTQDLFLPFFSNVTWFHAISGTNGTKRFDNPVLPFNDGVYFASTEKSNIIRGWIFGTTLDSKTQSLLIVNNATNVVIKVCEFQFCNDPFLGVYHKNNKSWMESEFRVYSSANNCTFEYVSQPFLMDLEGKQGNFKNLREFVFKNIDGYFKIYSKHTPINLVRDLPQGFSALEPLVDLPIGINITRFQTLLALHRSYLTPGDSSSGWTAGAAAYYVGYLQPRTFLLKYNENGTITDAVDCALDPLSETKCTLKSFTVEKGIYQTSNFRVQPTESIVRFPNITNLCPFGEVFNATRFASVYAWNRKRISNCVADYSVLYNSASFSTFKCYGVSPTKLNDLCFTNVYADSFVIRGDEVRQIAPGQTGKIADYNYKLPDDFTGCVIAWNSNNLDSKVGGNYNYLYRLFRKSNLKPFERDISTEIYQAGSTPCNGVEGFNCYFPLQSYGFQPTYGVGYQPYRVVVLSFELLHAPATVCGPKKSTNLVKNKCVNFNFNGLTGTGVLTESNKKFLPFQQFGRDIDDTTDAVRDPQTLEILDITPCSFGGVSVITPGTNTSNQVAVLYQGVNCTEVPVAIHADQLTPTWRVYSTGSNVFQTRAGCLIGAEHVNNSYECDIPIGAGICASYQTQTNSHGSASSVASQSIIAYTMSLGAENSVAYSNNSIAIPINFTISVTTEILPVSMTKTSVDCTMYICGDSTECSNLLLQYGSFCTQLNRALTGIAVEQDKNTQEVFAQVKQIYKTPPIKDFGGFNFSQILPDPSKPSKRSFIEDLLFNKVTLADAGFIKQYGDCLGDIAARDLICAQKFNGLTVLPPLLTDEMIAQYTSALLAGTITSGWTFGAGAALQIPFAMQMAYRFNGIGVTQNVLYENQKLIANQFNSAIGKIQDSLSSTASALGKLQDVVNQNAQALNTLVKQLSSNFGAISSVLNDILARLDPPEAEVQIDRLITGRLQSLQTYVTQQLIRAAEIRASANLAATKMSECVLGQSKRVDFCGKGYHLMSFPQSAPHGVVFLHVTYVPAQEKNFTTAPAICHDGKAHFPREGVFVSNGTHWFVTQRNFYEPQIITTHNTFVSGNCDVVIGIVNNTVYDPLQPELDSFKEELDKYFKNHTSPDVDLGDISGINASVVNIQKEIDRLNEVAKNLNESLIDLQELGKYEQYIKWPWYIWLGFIAGLIAIVMVTIMLCCMTSCCSCLKGCCSCGSCCKFDEDDSEPVLKGVKLHYT

SEQ ID NO: 158 - DNA, 3813 bp, Artificial Sequence
  Synthetic
atgttcgtcttcctcgtgctgctcccactcgtttcttcccagtgtgtcaacctgacaactaggactcagctgccaccagcctacaccaactccttcaccagaggcgtgtattacccagacaaggtgtttagaagcagcgtgctgcactctacccaggacctctttctgccctttttcagcaacgtgacatggtttcacgcaatttccggcactaatggcacaaagcggttcgacaatccagtcctgcctttcaacgatggcgtctactttgcatctactgagaaatccaatatcattaggggatggatcttcggcacaaccctggattctaagacccagagcctgctgatcgtcaacaacgccacaaacgtggtcattaaggtttgcgagtttcagttctgtaacgatccttttctgggcgtttaccataagaacaataagagctggatggagtccgagtttagagtgtatagctctgcaaataattgtacctttgagtacgtgagccagccctttctgatggacctggagggaaaacaaggaaacttcaaaaacctgcgggaattcgttttcaaaaacatcgacggctatttcaagatctatagcaagcataccccaatcaacctcgtgagggacctcccccagggctttagcgcactggagccactggttgacctgcctatcggcattaatatcacaagatttcagaccctgctggcactgcatagaagctatctgacccctggagactcctctagtgggtggactgccggcgccgctgcctactatgtgggctatctgcagccacggacattcctgctgaaatacaatgagaacgggacaatcacagatgctgttgattgcgcactcgaccccctgtccgagacaaagtgcactctcaagagctttaccgtcgagaagggcatctatcagacctcaaacttcagggtgcagcccacagaatctatcgtgcgcttccctaatatcactaacctgtgtcctttcggtgaagtgttcaacgccaccaggtttgctagcgtgtatgcctggaacaggaagaggatctctaactgcgtcgccgactattccgtgctgtataacagcgcctccttctccacattcaaatgctatggagtgagcccgacaaaactgaacgatctctgctttacaaatgtctacgccgactcttttgtgatcagaggggacgaggtccggcagatcgcaccaggacagacaggcaagattgctgactacaactataagctgcctgacgacttcacaggatgtgtgatcgcatggaactcaaacaatctggactccaaagtcgggggcaactataattacctgtatcgcctgttccggaagtccaacctgaagcccttcgagagggacatcagtacagagatctatcaggctggctccaccccttgcaatggcgtcgaaggctttaattgttattttcccctgcagtcttacgggtttcagcctacttatggagttgggtaccagccatacagagtggtcgtgctcagcttcgagctcctgcatgctccagctacagtttgcgggccaaagaagtccactaacctggtgaagaataagtgcgtcaacttcaactttaacgggctcaccggcaccggcgtgctgactgagagcaacaagaagtttctgccatttcaacagtttggacgggacattgatgacaccaccgatgccgttcgggatccacagaccctggaaattctggacattacaccgtgcagcttcgggggcgtgagcgtgatcacacccggaaccaatacaagcaaccaggttgccgtcctgtatcagggcgtcaattgcacagaagtgccagttgctatccacgcagaccagctgactcccacatggcgggtgtatagcaccggatccaacgtgtttcagacccgcgccggatgtctcattggggccgagcacgtgaataacagctacgagtgcgacatccccattggcgccggcatttgtgcgtcttaccagactcagaccaactctcatggctccgcctcttccgttgctagtcagtctattattgcctataccatgagcctcggagctgagaatagcgtggcctactccaataattccatcgcaatccctataaacttcactatttctgtgaccaccgagatcctgcctgtgtctatgactaagactagcgttgattgtaccatgtatatttgtggcgactctaccgaatgttctaacctgctgcttcagtacggctcattttgcacacagctgaacagagccctgactgggatcgctgtggagcaggacaagaacacacaggaggtgtttgcacaggtgaagcagatctataagacccctcctattaaggatttcggcggattcaatttctcacagattctgccagaccccagtaagccttccaagaggagccctatcgaggatctcctgtttaacaaggtgaccctggcagacgccggctttattaagcaatatggggattgcctgggcgacattgctgccagagacctgatttgcgcccagaaattcaatggcctcacagtgctgccacctctgctgaccgacgagatgatcgctcaatacactagcgcactgctggccggaaccatcacatcaggctggaccttcggggccggaccagcactgcagattccattccctatgcagatggcctatagattcaacggcattggcgtcacacagaacgtgctgtacgaaaaccagaagctcatcgctaaccagtttaattccgcaattggaaagatccaagattcactcagctcaaccccctctgcactcggaaagctgcaggacgtggtcaaccagaatgctcaggccctgaacacactcgtcaagcagctgtcctctaactttggcgctatcagctccgttctgaacgacattctggcacgcctggatcccccagaggctgaagtccagattgaccgcctgattaccggccggctgcagtctctgcaaacatacgtgacccagcagctgatcagagcagccgagatccgggcatccgcaaatctggcagcaactaagatgagcgaatgcgtgctgggccagtccaagcgggtggacttttgtggcaagggctaccacctgatgagcttcccccagagcgccccacatggcgttgtttttctgcacgtgacctatgtccctgctcaggaaaagaactttacaactgctcctgctatctgccatgacggcaaggcccacttcccacgggagggagtgtttgtgtccaatggcacacactggttcgtgacccagaggaacttctatgaaccccagatcatcaccactcacaataccttcgtgtctggaaattgcgacgtcgtgatcggcatcgttaacaacaccgtgtacgaccctctccagccagagctggactcctttaaggaggaactggataagtattttaagaaccacacaagcccagatgtggatctcggggacatctccggaattaacgcctccgtggtgaatatccagaaggagattgaccgcctaaatgaagttgccaagaacctcaatgagtctctgattgatctgcaggaactgggcaagtatgagcagtatatcaaatggccctggtacatttggctggggtttatcgccggactgattgccatcgtcatggtgaccatcatgctgtgttgcatgacctcctgttgttcctgtctgaagggctgctgtagttgcggctcttgctgtaaattcgacgaagatgatagcgagcccgtgctgaagggcgtgaagctgcattatacctga

SEQ ID NO: 159 - protein, 1270 aa, Artificial Sequence
  Synthetic
MFVFLVLLPLVSSQCVNLTTRTQLPPAYTNSFTRGVYYPDKVFRSSVLHSTQDLFLPFFSNVTWFHAISGTNGTKRFDNPVLPFNDGVYFASTEKSNIIRGWIFGTTLDSKTQSLLIVNNATNVVIKVCEFQFCNDPFLGVYHKNNKSWMESEFRVYSSANNCTFEYVSQPFLMDLEGKQGNFKNLREFVFKNIDGYFKIYSKHTPINLVRDLPQGFSALEPLVDLPIGINITRFQTLLALHRSYLTPGDSSSGWTAGAAAYYVGYLQPRTFLLKYNENGTITDAVDCALDPLSETKCTLKSFTVEKGIYQTSNFRVQPTESIVRFPNITNLCPFGEVFNATRFASVYAWNRKRISNCVADYSVLYNSASFSTFKCYGVSPTKLNDLCFTNVYADSFVIRGDEVRQIAPGQTGKIADYNYKLPDDFTGCVIAWNSNNLDSKVGGNYNYLYRLFRKSNLKPFERDISTEIYQAGSTPCNGVEGFNCYFPLQSYGFQPTYGVGYQPYRVVVLSFELLHAPATVCGPKKSTNLVKNKCVNFNFNGLTGTGVLTESNKKFLPFQQFGRDIDDTTDAVRDPQTLEILDITPCSFGGVSVITPGTNTSNQVAVLYQGVNCTEVPVAIHADQLTPTWRVYSTGSNVFQTRAGCLIGAEHVNNSYECDIPIGAGICASYQTQTNSHGSASSVASQSIIAYTMSLGAENSVAYSNNSIAIPINFTISVTTEILPVSMTKTSVDCTMYICGDSTECSNLLLQYGSFCTQLNRALTGIAVEQDKNTQEVFAQVKQIYKTPPIKDFGGFNFSQILPDPSKPSKRSPIEDLLFNKVTLADAGFIKQYGDCLGDIAARDLICAQKFNGLTVLPPLLTDEMIAQYTSALLAGTITSGWTFGAGPALQIPFPMQMAYRFNGIGVTQNVLYENQKLIANQFNSAIGKIQDSLSSTPSALGKLQDVVNQNAQALNTLVKQLSSNFGAISSVLNDILARLDPPEAEVQIDRLITGRLQSLQTYVTQQLIRAAEIRASANLAATKMSECVLGQSKRVDFCGKGYHLMSFPQSAPHGVVFLHVTYVPAQEKNFTTAPAICHDGKAHFPREGVFVSNGTHWFVTQRNFYEPQIITTHNTFVSGNCDVVIGIVNNTVYDPLQPELDSFKEELDKYFKNHTSPDVDLGDISGINASVVNIQKEIDRLNEVAKNLNESLIDLQELGKYEQYIKWPWYIWLGFIAGLIAIVMVTIMLCCMTSCCSCLKGCCSCGSCCKFDEDDSEPVLKGVKLHYT

SEQ ID NO: 160 - DNA, 3813 bp, Artificial Sequence
  Synthetic
atgttcgtcttcctcgtgctgctcccactcgtttcttcccagtgtgtcaacctgacaactaggactcagctgccaccagcctacaccaactccttcaccagaggcgtgtattacccagacaaggtgtttagaagcagcgtgctgcactctacccaggacctctttctgccctttttcagcaacgtgacatggtttcacgcaattcacgtgtccggcactaatggcacaaagcggttcgccaatccagtcctgcctttcaacgatggcgtctactttgcatctactgagaaatccaatatcattaggggatggatcttcggcacaaccctggattctaagacccagagcctgctgatcgtcaacaacgccacaaacgtggtcattaaggtttgcgagtttcagttctgtaacgatccttttctgggcgtgtattatcataagaacaataagagctggatggagtccgagtttagagtgtatagctctgcaaataattgtacctttgagtacgtgagccagccctttctgatggacctggagggaaaacaaggaaacttcaaaaacctgcgggaattcgttttcaaaaacatcgacggctatttcaagatctatagcaagcataccccaatcaacctcgtgaggggcctcccccagggctttagcgcactggagccactggttgacctgcctatcggcattaatatcacaagatttcagaccctgcatagaagctatctgacccctggagactcctctagtgggtggactgccggcgccgctgcctactatgtgggctatctgcagccacggacattcctgctgaaatacaatgagaacgggacaatcacagatgctgttgattgcgcactcgaccccctgtccgagacaaagtgcactctcaagagctttaccgtcgagaagggcatctatcagacctcaaacttcagggtgcagcccacagaatctatcgtgcgcttccctaatatcactaacctgtgtcctttcggtgaagtgttcaacgccaccaggtttgctagcgtgtatgcctggaacaggaagaggatctctaactgcgtcgccgactattccgtgctgtataacagcgcctccttctccacattcaaatgctatggagtgagcccgacaaaactgaacgatctctgctttacaaatgtctacgccgactcttttgtgatcagaggggacgaggtccggcagatcgcaccaggacagacaggcaacattgctgactacaactataagctgcctgacgacttcacaggatgtgtgatcgcatggaactcaaacaatctggactccaaagtcgggggcaactataattacctgtatcgcctgttccggaagtccaacctgaagcccttcgagagggacatcagtacagagatctatcaggctggctccaccccttgcaatggcgtcaagggctttaattgttattttcccctgcagtcttacgggtttcagcctacttacggagttgggtaccagccatacagagtggtcgtgctcagcttcgagctcctgcatgctccagctacagtttgcgggccaaagaagtccactaacctggtgaagaataagtgcgtcaacttcaactttaacgggctcaccggcaccggcgtgctgactgagagcaacaagaagtttctgccatttcaacagtttggacgggacattgccgacaccaccgatgccgttcgggatccacagaccctggaaattctggacattacaccgtgcagcttcgggggcgtgagcgtgatcacacccggaaccaatacaagcaaccaggttgccgtcctgtatcagggcgtcaattgcacagaagtgccagttgctatccacgcagaccagctgactcccacatggcgggtgtatagcaccggatccaacgtgtttcagacccgcgccggatgtctcattggggccgagcacgtgaataacagctacgagtgcgacatccccattggcgccggcatttgtgcgtcttaccagactcagaccaactctcctagaagggccaggtccgttgctagtcagtctattattgcctataccatgagcctcggagtggagaatagcgtggcctactccaataattccatcgcaatccctactaacttcactatttctgtgaccaccgagatcctgcctgtgtctatgactaagactagcgttgattgtaccatgtatatttgtggcgactctaccgaatgttctaacctgctgcttcagtacggctcattttgcacacagctgaacagagccctgactgggatcgctgtggagcaggacaagaacacacaggaggtgtttgcacaggtgaagcagatctataagacccctcctattaaggatttcggcggattcaatttctcacagattctgccagaccccagtaagccttccaagaggagcttcatcgaggatctcctgtttaacaaggtgaccctggcagacgccggctttattaagcaatatggggattgcctgggcgacattgctgccagagacctgatttgcgcccagaaattcaatggcctcacagtgctgccacctctgctgaccgacgagatgatcgctcaatacactagcgcactgctggccggaaccatcacatcaggctggaccttcggggccggagcagcactgcagattccattcgccatgcagatggcctatagattcaacggcattggcgtcacacagaacgtgctgtacgaaaaccagaagctcatcgctaaccagtttaattccgcaattggaaagatccaagattcactcagctcaaccgcctctgcactcggaaagctgcaggacgtggtcaaccagaatgctcaggccctgaacacactcgtcaagcagctgtcctctaactttggcgctatcagctccgttctgaacgacattctgagccgcctggataaggtggaggctgaagtccagattgaccgcctgattaccggccggctgcagtctctgcaaacatacgtgacccagcagctgatcagagcagccgagatccgggcatccgcaaatctggcagcaactaagatgagcgaatgcgtgctgggccagtccaagcgggtggacttttgtggcaagggctaccacctgatgagcttcccccagagcgccccacatggcgttgtttttctgcacgtgacctatgtccctgctcaggaaaagaactttacaactgctcctgctatctgccatgacggcaaggcccacttcccacgggagggagtgtttgtgtccaatggcacacactggttcgtgacccagaggaacttctatgaaccccagatcatcaccactgacaataccttcgtgtctggaaattgcgacgtcgtgatcggcatcgttaacaacaccgtgtacgaccctctccagccagagctggactcctttaaggaggaactggataagtattttaagaaccacacaagcccagatgtggatctcggggacatctccggaattaacgcctccgtggtgaatatccagaaggagattgaccgcctaaatgaagttgccaagaacctcaatgagtctctgattgatctgcaggaactgggcaagtatgagcagtatatcaaatggccctggtacatttggctggggtttatcgccggactgattgccatcgtcatggtgaccatcatgctgtgttgcatgacctcctgttgttcctgtctgaagggctgctgtagttgcggctcttgctgtaaattcgacgaagatgatagcgagcccgtgctgaagggcgtgaagctgcattatacctga

SEQ ID NO: 161 - protein, 1270 aa, Artificial Sequence
  Synthetic
MFVFLVLLPLVSSQCVNLTTRTQLPPAYTNSFTRGVYYPDKVFRSSVLHSTQDLFLPFFSNVTWFHAIHVSGTNGTKRFANPVLPFNDGVYFASTEKSNIIRGWIFGTTLDSKTQSLLIVNNATNVVIKVCEFQFCNDPFLGVYYHKNNKSWMESEFRVYSSANNCTFEYVSQPFLMDLEGKQGNFKNLREFVFKNIDGYFKIYSKHTPINLVRGLPQGFSALEPLVDLPIGINITRFQTLHRSYLTPGDSSSGWTAGAAAYYVGYLQPRTFLLKYNENGTITDAVDCALDPLSETKCTLKSFTVEKGIYQTSNFRVQPTESIVRFPNITNLCPFGEVFNATRFASVYAWNRKRISNCVADYSVLYNSASFSTFKCYGVSPTKLNDLCFTNVYADSFVIRGDEVRQIAPGQTGNIADYNYKLPDDFTGCVIAWNSNNLDSKVGGNYNYLYRLFRKSNLKPFERDISTEIYQAGSTPCNGVKGFNCYFPLQSYGFQPTYGVGYQPYRVVVLSFELLHAPATVCGPKKSTNLVKNKCVNFNFNGLTGTGVLTESNKKFLPFQQFGRDIADTTDAVRDPQTLEILDITPCSFGGVSVITPGTNTSNQVAVLYQGVNCTEVPVAIHADQLTPTWRVYSTGSNVFQTRAGCLIGAEHVNNSYECDIPIGAGICASYQTQTNSPRRARSVASQSIIAYTMSLGVENSVAYSNNSIAIPTNFTISVTTEILPVSMTKTSVDCTMYICGDSTECSNLLLQYGSFCTQLNRALTGIAVEQDKNTQEVFAQVKQIYKTPPIKDFGGFNFSQILPDPSKPSKRSFIEDLLFNKVTLADAGFIKQYGDCLGDIAARDLICAQKFNGLTVLPPLLTDEMIAQYTSALLAGTITSGWTFGAGAALQIPFAMQMAYRFNGIGVTQNVLYENQKLIANQFNSAIGKIQDSLSSTASALGKLQDVVNQNAQALNTLVKQLSSNFGAISSVLNDILSRLDKVEAEVQIDRLITGRLQSLQTYVTQQLIRAAEIRASANLAATKMSECVLGQSKRVDFCGKGYHLMSFPQSAPHGVVFLHVTYVPAQEKNFTTAPAICHDGKAHFPREGVFVSNGTHWFVTQRNFYEPQIITTDNTFVSGNCDVVIGIVNNTVYDPLQPELDSFKEELDKYFKNHTSPDVDLGDISGINASVVNIQKEIDRLNEVAKNLNESLIDLQELGKYEQYIKWPWYIWLGFIAGLIAIVMVTIMLCCMTSCCSCLKGCCSCGSCCKFDEDDSEPVLKGVKLHYT

SEQ ID NO: 162 - DNA, 3813 bp, Artificial Sequence
  Synthetic
atgttcgtcttcctcgtgctgctcccactcgtttcttcccagtgtgtcaacctgacaactaggactcagctgccaccagcctacaccaactccttcaccagaggcgtgtattacccagacaaggtgtttagaagcagcgtgctgcactctacccaggacctctttctgccctttttcagcaacgtgacatggtttcacgcaattcacgtgtccggcactaatggcacaaagcggttcgccaatccagtcctgcctttcaacgatggcgtctactttgcatctactgagaaatccaatatcattaggggatggatcttcggcacaaccctggattctaagacccagagcctgctgatcgtcaacaacgccacaaacgtggtcattaaggtttgcgagtttcagttctgtaacgatccttttctgggcgtgtattatcataagaacaataagagctggatggagtccgagtttagagtgtatagctctgcaaataattgtacctttgagtacgtgagccagccctttctgatggacctggagggaaaacaaggaaacttcaaaaacctgcgggaattcgttttcaaaaacatcgacggctatttcaagatctatagcaagcataccccaatcaacctcgtgaggggcctcccccagggctttagcgcactggagccactggttgacctgcctatcggcattaatatcacaagatttcagaccctgcatagaagctatctgacccctggagactcctctagtgggtggactgccggcgccgctgcctactatgtgggctatctgcagccacggacattcctgctgaaatacaatgagaacgggacaatcacagatgctgttgattgcgcactcgaccccctgtccgagacaaagtgcactctcaagagctttaccgtcgagaagggcatctatcagacctcaaacttcagggtgcagcccacagaatctatcgtgcgcttccctaatatcactaacctgtgtcctttcggtgaagtgttcaacgccaccaggtttgctagcgtgtatgcctggaacaggaagaggatctctaactgcgtcgccgactattccgtgctgtataacagcgcctccttctccacattcaaatgctatggagtgagcccgacaaaactgaacgatctctgctttacaaatgtctacgccgactcttttgtgatcagaggggacgaggtccggcagatcgcaccaggacagacaggcaacattgctgactacaactataagctgcctgacgacttcacaggatgtgtgatcgcatggaactcaaacaatctggactccaaagtcgggggcaactataattacctgtatcgcctgttccggaagtccaacctgaagcccttcgagagggacatcagtacagagatctatcaggctggctccaccccttgcaatggcgtcaagggctttaattgttattttcccctgcagtcttacgggtttcagcctacttacggagttgggtaccagccatacagagtggtcgtgctcagcttcgagctcctgcatgctccagctacagtttgcgggccaaagaagtccactaacctggtgaagaataagtgcgtcaacttcaactttaacgggctcaccggcaccggcgtgctgactgagagcaacaagaagtttctgccatttcaacagtttggacgggacattgccgacaccaccgatgccgttcgggatccacagaccctggaaattctggacattacaccgtgcagcttcgggggcgtgagcgtgatcacacccggaaccaatacaagcaaccaggttgccgtcctgtatcagggcgtcaattgcacagaagtgccagttgctatccacgcagaccagctgactcccacatggcgggtgtatagcaccggatccaacgtgtttcagacccgcgccggatgtctcattggggccgagcacgtgaataacagctacgagtgcgacatccccattggcgccggcatttgtgcgtcttaccagactcagaccaactctcctggctccgcctcttccgttgctagtcagtctattattgcctataccatgagcctcggagtggagaatagcgtggcctactccaataattccatcgcaatccctactaacttcactatttctgtgaccaccgagatcctgcctgtgtctatgactaagactagcgttgattgtaccatgtatatttgtggcgactctaccgaatgttctaacctgctgcttcagtacggctcattttgcacacagctgaacagagccctgactgggatcgctgtggagcaggacaagaacacacaggaggtgtttgcacaggtgaagcagatctataagacccctcctattaaggatttcggcggattcaatttctcacagattctgccagaccccagtaagccttccaagaggagcttcatcgaggatctcctgtttaacaaggtgaccctggcagacgccggctttattaagcaatatggggattgcctgggcgacattgctgccagagacctgatttgcgcccagaaattcaatggcctcacagtgctgccacctctgctgaccgacgagatgatcgctcaatacactagcgcactgctggccggaaccatcacatcaggctggaccttcggggccggagcagcactgcagattccattcgccatgcagatggcctatagattcaacggcattggcgtcacacagaacgtgctgtacgaaaaccagaagctcatcgctaaccagtttaattccgcaattggaaagatccaagattcactcagctcaaccgcctctgcactcggaaagctgcaggacgtggtcaaccagaatgctcaggccctgaacacactcgtcaagcagctgtcctctaactttggcgctatcagctccgttctgaacgacattctgagccgcctggatcccccagaggctgaagtccagattgaccgcctgattaccggccggctgcagtctctgcaaacatacgtgacccagcagctgatcagagcagccgagatccgggcatccgcaaatctggcagcaactaagatgagcgaatgcgtgctgggccagtccaagcgggtggacttttgtggcaagggctaccacctgatgagcttcccccagagcgccccacatggcgttgtttttctgcacgtgacctatgtccctgctcaggaaaagaactttacaactgctcctgctatctgccatgacggcaaggcccacttcccacgggagggagtgtttgtgtccaatggcacacactggttcgtgacccagaggaacttctatgaaccccagatcatcaccactgacaataccttcgtgtctggaaattgcgacgtcgtgatcggcatcgttaacaacaccgtgtacgaccctctccagccagagctggactcctttaaggaggaactggataagtattttaagaaccacacaagcccagatgtggatctcggggacatctccggaattaacgcctccgtggtgaatatccagaaggagattgaccgcctaaatgaagttgccaagaacctcaatgagtctctgattgatctgcaggaactgggcaagtatgagcagtatatcaaatggccctggtacatttggctggggtttatcgccggactgattgccatcgtcatggtgaccatcatgctgtgttgcatgacctcctgttgttcctgtctgaagggctgctgtagttgcggctcttgctgtaaattcgacgaagatgatagcgagcccgtgctgaagggcgtgaagctgcattatacctga

SEQ ID NO: 163 - protein, 1270 aa, Artificial Sequence
  Synthetic
MFVFLVLLPLVSSQCVNLTTRTQLPPAYTNSFTRGVYYPDKVFRSSVLHSTQDLFLPFFSNVTWFHAIHVSGTNGTKRFANPVLPFNDGVYFASTEKSNIIRGWIFGTTLDSKTQSLLIVNNATNVVIKVCEFQFCNDPFLGVYYHKNNKSWMESEFRVYSSANNCTFEYVSQPFLMDLEGKQGNFKNLREFVFKNIDGYFKIYSKHTPINLVRGLPQGFSALEPLVDLPIGINITRFQTLHRSYLTPGDSSSGWTAGAAAYYVGYLQPRTFLLKYNENGTITDAVDCALDPLSETKCTLKSFTVEKGIYQTSNFRVQPTESIVRFPNITNLCPFGEVFNATRFASVYAWNRKRISNCVADYSVLYNSASFSTFKCYGVSPTKLNDLCFTNVYADSFVIRGDEVRQIAPGQTGNIADYNYKLPDDFTGCVIAWNSNNLDSKVGGNYNYLYRLFRKSNLKPFERDISTEIYQAGSTPCNGVKGFNCYFPLQSYGFQPTYGVGYQPYRVVVLSFELLHAPATVCGPKKSTNLVKNKCVNFNFNGLTGTGVLTESNKKFLPFQQFGRDIADTTDAVRDPQTLEILDITPCSFGGVSVITPGTNTSNQVAVLYQGVNCTEVPVAIHADQLTPTWRVYSTGSNVFQTRAGCLIGAEHVNNSYECDIPIGAGICASYQTQTNSPGSASSVASQSIIAYTMSLGVENSVAYSNNSIAIPTNFTISVTTEILPVSMTKTSVDCTMYICGDSTECSNLLLQYGSFCTQLNRALTGIAVEQDKNTQEVFAQVKQIYKTPPIKDFGGFNFSQILPDPSKPSKRSFIEDLLFNKVTLADAGFIKQYGDCLGDIAARDLICAQKFNGLTVLPPLLTDEMIAQYTSALLAGTITSGWTFGAGAALQIPFAMQMAYRFNGIGVTQNVLYENQKLIANQFNSAIGKIQDSLSSTASALGKLQDVVNQNAQALNTLVKQLSSNFGAISSVLNDILSRLDPPEAEVQIDRLITGRLQSLQTYVTQQLIRAAEIRASANLAATKMSECVLGQSKRVDFCGKGYHLMSFPQSAPHGVVFLHVTYVPAQEKNFTTAPAICHDGKAHFPREGVFVSNGTHWFVTQRNFYEPQIITTDNTFVSGNCDVVIGIVNNTVYDPLQPELDSFKEELDKYFKNHTSPDVDLGDISGINASVVNIQKEIDRLNEVAKNLNESLIDLQELGKYEQYIKWPWYIWLGFIAGLIAIVMVTIMLCCMTSCCSCLKGCCSCGSCCKFDEDDSEPVLKGVKLHYT

SEQ ID NO: 164 - DNA, 3813 bp, Artificial Sequence
  Synthetic
atgttcgtcttcctcgtgctgctcccactcgtttcttcccagtgtgtcaacttcacaactaggactcagctgccaccagcctacaccaactccttcaccagaggcgtgtattacccagacaaggtgtttagaagcagcgtgctgcactctacccaggacctctttctgccctttttcagcaacgtgacatggtttcacgcaattcacgtgtccggcactaatggcacaaagcggttcgccaatccagtcctgcctttcaacgatggcgtctactttgcatctactgagaaatccaatatcattaggggatggatcttcggcacaaccctggattctaagacccagagcctgctgatcgtcaacaacgccacaaacgtggtcattaaggtttgcgagtttcagttctgtaacgatccttttctgggcgtgtattatcataagaacaataagagctggatggagtccgagtttagagtgtatagctctgcaaataattgtacctttgagtacgtgagccagccctttctgatggacctggagggaaaacaaggaaacttcaaaaacctgcgggaattcgttttcaaaaacatcgacggctatttcaagatctatagcaagcataccccaatcaacctcgtgaggggcctcccccagggctttagcgcactggagccactggttgacctgcctatcggcattaatatcacaagatttcagaccctgcatagaagctatctgacccctggagactcctctagtgggtggactgccggcgccgctgcctactatgtgggctatctgcagccacggacattcctgctgaaatacaatgagaacgggacaatcacagatgctgttgattgcgcactcgaccccctgtccgagacaaagtgcactctcaagagctttaccgtcgagaagggcatctatcagacctcaaacttcagggtgcagcccacagaatctatcgtgcgcttccctaatatcactaacctgtgtcctttcggtgaagtgttcaacgccaccaggtttgctagcgtgtatgcctggaacaggaagaggatctctaactgcgtcgccgactattccgtgctgtataacagcgcctccttctccacattcaaatgctatggagtgagcccgacaaaactgaacgatctctgctttacaaatgtctacgccgactcttttgtgatcagaggggacgaggtccggcagatcgcaccaggacagacaggcaacattgctgactacaactataagctgcctgacgacttcacaggatgtgtgatcgcatggaactcaaacaatctggactccaaagtcgggggcaactataattacctgtatcgcctgttccggaagtccaacctgaagcccttcgagagggacatcagtacagagatctatcaggctggctccaccccttgcaatggcgtcaagggctttaattgttattttcccctgcagtcttacgggtttcagcctacttacggagttgggtaccagccatacagagtggtcgtgctcagcttcgagctcctgcatgctccagctacagtttgcgggccaaagaagtccactaacctggtgaagaataagtgcgtcaacttcaactttaacgggctcaccggcaccggcgtgctgactgagagcaacaagaagtttctgccatttcaacagtttggacgggacattgccgacaccaccgatgccgttcgggatccacagaccctggaaattctggacattacaccgtgcagcttcgggggcgtgagcgtgatcacacccggaaccaatacaagcaaccaggttgccgtcctgtatcagggcgtcaattgcacagaagtgccagttgctatccacgcagaccagctgactcccacatggcgggtgtatagcaccggatccaacgtgtttcagacccgcgccggatgtctcattggggccgagcacgtgaataacagctacgagtgcgacatccccattggcgccggcatttgtgcgtcttaccagactcagaccaactctcctagaagggccaggtccgttgctagtcagtctattattgcctataccatgagcctcggagtggagaatagcgtggcctactccaataattccatcgcaatccctactaacttcactatttctgtgaccaccgagatcctgcctgtgtctatgactaagactagcgttgattgtaccatgtatatttgtggcgactctaccgaatgttctaacctgctgcttcagtacggctcattttgcacacagctgaacagagccctgactgggatcgctgtggagcaggacaagaacacacaggaggtgtttgcacaggtgaagcagatctataagacccctcctattaaggatttcggcggattcaatttctcacagattctgccagaccccagtaagccttccaagaggagcttcatcgaggatctcctgtttaacaaggtgaccctggcagacgccggctttattaagcaatatggggattgcctgggcgacattgctgccagagacctgatttgcgcccagaaattcaatggcctcacagtgctgccacctctgctgaccgacgagatgatcgctcaatacactagcgcactgctggccggaaccatcacatcaggctggaccttcggggccggagcagcactgcagattccattcgccatgcagatggcctatagattcaacggcattggcgtcacacagaacgtgctgtacgaaaaccagaagctcatcgctaaccagtttaattccgcaattggaaagatccaagattcactcagctcaaccgcctctgcactcggaaagctgcaggacgtggtcaaccagaatgctcaggccctgaacacactcgtcaagcagctgtcctctaactttggcgctatcagctccgttctgaacgacattctgagccgcctggataaggtggaggctgaagtccagattgaccgcctgattaccggccggctgcagtctctgcaaacatacgtgacccagcagctgatcagagcagccgagatccgggcatccgcaaatctggcagcaactaagatgagcgaatgcgtgctgggccagtccaagcgggtggacttttgtggcaagggctaccacctgatgagcttcccccagagcgccccacatggcgttgtttttctgcacgtgacctatgtccctgctcaggaaaagaactttacaactgctcctgctatctgccatgacggcaaggcccacttcccacgggagggagtgtttgtgtccaatggcacacactggttcgtgacccagaggaacttctatgaaccccagatcatcaccactgacaataccttcgtgtctggaaattgcgacgtcgtgatcggcatcgttaacaacaccgtgtacgaccctctccagccagagctggactcctttaaggaggaactggataagtattttaagaaccacacaagcccagatgtggatctcggggacatctccggaattaacgcctccgtggtgaatatccagaaggagattgaccgcctaaatgaagttgccaagaacctcaatgagtctctgattgatctgcaggaactgggcaagtatgagcagtatatcaaatggccctggtacatttggctggggtttatcgccggactgattgccatcgtcatggtgaccatcatgctgtgttgcatgacctcctgttgttcctgtctgaagggctgctgtagttgcggctcttgctgtaaattcgacgaagatgatagcgagcccgtgctgaagggcgtgaagctgcattatacctga

SEQ ID NO: 165 - protein, 1270 aa, Artificial Sequence
  Synthetic
MFVFLVLLPLVSSQCVNFTTRTQLPPAYTNSFTRGVYYPDKVFRSSVLHSTQDLFLPFFSNVTWFHAIHVSGTNGTKRFANPVLPFNDGVYFASTEKSNIIRGWIFGTTLDSKTQSLLIVNNATNVVIKVCEFQFCNDPFLGVYYHKNNKSWMESEFRVYSSANNCTFEYVSQPFLMDLEGKQGNFKNLREFVFKNIDGYFKIYSKHTPINLVRGLPQGFSALEPLVDLPIGINITRFQTLHRSYLTPGDSSSGWTAGAAAYYVGYLQPRTFLLKYNENGTITDAVDCALDPLSETKCTLKSFTVEKGIYQTSNFRVQPTESIVRFPNITNLCPFGEVFNATRFASVYAWNRKRISNCVADYSVLYNSASFSTFKCYGVSPTKLNDLCFTNVYADSFVIRGDEVRQIAPGQTGNIADYNYKLPDDFTGCVIAWNSNNLDSKVGGNYNYLYRLFRKSNLKPFERDISTEIYQAGSTPCNGVKGFNCYFPLQSYGFQPTYGVGYQPYRVVVLSFELLHAPATVCGPKKSTNLVKNKCVNFNFNGLTGTGVLTESNKKFLPFQQFGRDIADTTDAVRDPQTLEILDITPCSFGGVSVITPGTNTSNQVAVLYQGVNCTEVPVAIHADQLTPTWRVYSTGSNVFQTRAGCLIGAEHVNNSYECDIPIGAGICASYQTQTNSPRRARSVASQSIIAYTMSLGVENSVAYSNNSIAIPTNFTISVTTEILPVSMTKTSVDCTMYICGDSTECSNLLLQYGSFCTQLNRALTGIAVEQDKNTQEVFAQVKQIYKTPPIKDFGGFNFSQILPDPSKPSKRSFIEDLLFNKVTLADAGFIKQYGDCLGDIAARDLICAQKFNGLTVLPPLLTDEMIAQYTSALLAGTITSGWTFGAGAALQIPFAMQMAYRFNGIGVTQNVLYENQKLIANQFNSAIGKIQDSLSSTASALGKLQDVVNQNAQALNTLVKQLSSNFGAISSVLNDILSRLDKVEAEVQIDRLITGRLQSLQTYVTQQLIRAAEIRASANLAATKMSECVLGQSKRVDFCGKGYHLMSFPQSAPHGVVFLHVTYVPAQEKNFTTAPAICHDGKAHFPREGVFVSNGTHWFVTQRNFYEPQIITTDNTFVSGNCDVVIGIVNNTVYDPLQPELDSFKEELDKYFKNHTSPDVDLGDISGINASVVNIQKEIDRLNEVAKNLNESLIDLQELGKYEQYIKWPWYIWLGFIAGLIAIVMVTIMLCCMTSCCSCLKGCCSCGSCCKFDEDDSEPVLKGVKLHYT

SEQ ID NO: 166 - DNA, 3813 bp, Artificial Sequence
  Synthetic
atgttcgtcttcctcgtgctgctcccactcgtttcttcccagtgtgtcaacttcacaactaggactcagctgccaccagcctacaccaactccttcaccagaggcgtgtattacccagacaaggtgtttagaagcagcgtgctgcactctacccaggacctctttctgccctttttcagcaacgtgacatggtttcacgcaattcacgtgtccggcactaatggcacaaagcggttcgccaatccagtcctgcctttcaacgatggcgtctactttgcatctactgagaaatccaatatcattaggggatggatcttcggcacaaccctggattctaagacccagagcctgctgatcgtcaacaacgccacaaacgtggtcattaaggtttgcgagtttcagttctgtaacgatccttttctgggcgtgtattatcataagaacaataagagctggatggagtccgagtttagagtgtatagctctgcaaataattgtacctttgagtacgtgagccagccctttctgatggacctggagggaaaacaaggaaacttcaaaaacctgcgggaattcgttttcaaaaacatcgacggctatttcaagatctatagcaagcataccccaatcaacctcgtgaggggcctcccccagggctttagcgcactggagccactggttgacctgcctatcggcattaatatcacaagatttcagaccctgcatagaagctatctgacccctggagactcctctagtgggtggactgccggcgccgctgcctactatgtgggctatctgcagccacggacattcctgctgaaatacaatgagaacgggacaatcacagatgctgttgattgcgcactcgaccccctgtccgagacaaagtgcactctcaagagctttaccgtcgagaagggcatctatcagacctcaaacttcagggtgcagcccacagaatctatcgtgcgcttccctaatatcactaacctgtgtcctttcggtgaagtgttcaacgccaccaggtttgctagcgtgtatgcctggaacaggaagaggatctctaactgcgtcgccgactattccgtgctgtataacagcgcctccttctccacattcaaatgctatggagtgagcccgacaaaactgaacgatctctgctttacaaatgtctacgccgactcttttgtgatcagaggggacgaggtccggcagatcgcaccaggacagacaggcaacattgctgactacaactataagctgcctgacgacttcacaggatgtgtgatcgcatggaactcaaacaatctggactccaaagtcgggggcaactataattacctgtatcgcctgttccggaagtccaacctgaagcccttcgagagggacatcagtacagagatctatcaggctggctccaccccttgcaatggcgtcaagggctttaattgttattttcccctgcagtcttacgggtttcagcctacttacggagttgggtaccagccatacagagtggtcgtgctcagcttcgagctcctgcatgctccagctacagtttgcgggccaaagaagtccactaacctggtgaagaataagtgcgtcaacttcaactttaacgggctcaccggcaccggcgtgctgactgagagcaacaagaagtttctgccatttcaacagtttggacgggacattgccgacaccaccgatgccgttcgggatccacagaccctggaaattctggacattacaccgtgcagcttcgggggcgtgagcgtgatcacacccggaaccaatacaagcaaccaggttgccgtcctgtatcagggcgtcaattgcacagaagtgccagttgctatccacgcagaccagctgactcccacatggcgggtgtatagcaccggatccaacgtgtttcagacccgcgccggatgtctcattggggccgagcacgtgaataacagctacgagtgcgacatccccattggcgccggcatttgtgcgtcttaccagactcagaccaactctcctggctccgcctcttccgttgctagtcagtctattattgcctataccatgagcctcggagtggagaatagcgtggcctactccaataattccatcgcaatccctactaacttcactatttctgtgaccaccgagatcctgcctgtgtctatgactaagactagcgttgattgtaccatgtatatttgtggcgactctaccgaatgttctaacctgctgcttcagtacggctcattttgcacacagctgaacagagccctgactgggatcgctgtggagcaggacaagaacacacaggaggtgtttgcacaggtgaagcagatctataagacccctcctattaaggatttcggcggattcaatttctcacagattctgccagaccccagtaagccttccaagaggagcttcatcgaggatctcctgtttaacaaggtgaccctggcagacgccggctttattaagcaatatggggattgcctgggcgacattgctgccagagacctgatttgcgcccagaaattcaatggcctcacagtgctgccacctctgctgaccgacgagatgatcgctcaatacactagcgcactgctggccggaaccatcacatcaggctggaccttcggggccggagcagcactgcagattccattcgccatgcagatggcctatagattcaacggcattggcgtcacacagaacgtgctgtacgaaaaccagaagctcatcgctaaccagtttaattccgcaattggaaagatccaagattcactcagctcaaccgcctctgcactcggaaagctgcaggacgtggtcaaccagaatgctcaggccctgaacacactcgtcaagcagctgtcctctaactttggcgctatcagctccgttctgaacgacattctgagccgcctggatcccccagaggctgaagtccagattgaccgcctgattaccggccggctgcagtctctgcaaacatacgtgacccagcagctgatcagagcagccgagatccgggcatccgcaaatctggcagcaactaagatgagcgaatgcgtgctgggccagtccaagcgggtggacttttgtggcaagggctaccacctgatgagcttcccccagagcgccccacatggcgttgtttttctgcacgtgacctatgtccctgctcaggaaaagaactttacaactgctcctgctatctgccatgacggcaaggcccacttcccacgggagggagtgtttgtgtccaatggcacacactggttcgtgacccagaggaacttctatgaaccccagatcatcaccactgacaataccttcgtgtctggaaattgcgacgtcgtgatcggcatcgttaacaacaccgtgtacgaccctctccagccagagctggactcctttaaggaggaactggataagtattttaagaaccacacaagcccagatgtggatctcggggacatctccggaattaacgcctccgtggtgaatatccagaaggagattgaccgcctaaatgaagttgccaagaacctcaatgagtctctgattgatctgcaggaactgggcaagtatgagcagtatatcaaatggccctggtacatttggctggggtttatcgccggactgattgccatcgtcatggtgaccatcatgctgtgttgcatgacctcctgttgttcctgtctgaagggctgctgtagttgcggctcttgctgtaaattcgacgaagatgatagcgagcccgtgctgaagggcgtgaagctgcattatacctga

SEQ ID NO: 167 - protein, 1270 aa, Artificial Sequence
  Synthetic
MFVFLVLLPLVSSQCVNFTTRTQLPPAYTNSFTRGVYYPDKVFRSSVLHSTQDLFLPFFSNVTWFHAIHVSGTNGTKRFANPVLPFNDGVYFASTEKSNIIRGWIFGTTLDSKTQSLLIVNNATNVVIKVCEFQFCNDPFLGVYYHKNNKSWMESEFRVYSSANNCTFEYVSQPFLMDLEGKQGNFKNLREFVFKNIDGYFKIYSKHTPINLVRGLPQGFSALEPLVDLPIGINITRFQTLHRSYLTPGDSSSGWTAGAAAYYVGYLQPRTFLLKYNENGTITDAVDCALDPLSETKCTLKSFTVEKGIYQTSNFRVQPTESIVRFPNITNLCPFGEVFNATRFASVYAWNRKRISNCVADYSVLYNSASFSTFKCYGVSPTKLNDLCFTNVYADSFVIRGDEVRQIAPGQTGNIADYNYKLPDDFTGCVIAWNSNNLDSKVGGNYNYLYRLFRKSNLKPFERDISTEIYQAGSTPCNGVKGFNCYFPLQSYGFQPTYGVGYQPYRVVVLSFELLHAPATVCGPKKSTNLVKNKCVNFNFNGLTGTGVLTESNKKFLPFQQFGRDIADTTDAVRDPQTLEILDITPCSFGGVSVITPGTNTSNQVAVLYQGVNCTEVPVAIHADQLTPTWRVYSTGSNVFQTRAGCLIGAEHVNNSYECDIPIGAGICASYQTQTNSPGSASSVASQSIIAYTMSLGVENSVAYSNNSIAIPTNFTISVTTEILPVSMTKTSVDCTMYICGDSTECSNLLLQYGSFCTQLNRALTGIAVEQDKNTQEVFAQVKQIYKTPPIKDFGGFNFSQILPDPSKPSKRSFIEDLLFNKVTLADAGFIKQYGDCLGDIAARDLICAQKFNGLTVLPPLLTDEMIAQYTSALLAGTITSGWTFGAGAALQIPFAMQMAYRFNGIGVTQNVLYENQKLIANQFNSAIGKIQDSLSSTASALGKLQDVVNQNAQALNTLVKQLSSNFGAISSVLNDILSRLDPPEAEVQIDRLITGRLQSLQTYVTQQLIRAAEIRASANLAATKMSECVLGQSKRVDFCGKGYHLMSFPQSAPHGVVFLHVTYVPAQEKNFTTAPAICHDGKAHFPREGVFVSNGTHWFVTQRNFYEPQIITTDNTFVSGNCDVVIGIVNNTVYDPLQPELDSFKEELDKYFKNHTSPDVDLGDISGINASVVNIQKEIDRLNEVAKNLNESLIDLQELGKYEQYIKWPWYIWLGFIAGLIAIVMVTIMLCCMTSCCSCLKGCCSCGSCCKFDEDDSEPVLKGVKLHYT

SEQ ID NO: 168 - DNA, 3822 bp, Artificial Sequence
  Synthetic
atgttcgtcttcctcgtgctgctcccactcgtttcttcccagtgtgtcaactttacaaacaggactcagctgccatccgcctacaccaactccttcaccagaggcgtgtattacccagacaaggtgtttagaagcagcgtgctgcactctacccaggacctctttctgccctttttcagcaacgtgacatggtttcacgcaattcacgtgtccggcactaatggcacaaagcggttcgacaatccagtcctgcctttcaacgatggcgtctactttgcatctactgagaaatccaatatcattaggggatggatcttcggcacaaccctggattctaagacccagagcctgctgatcgtcaacaacgccacaaacgtggtcattaaggtttgcgagtttcagttctgtaactacccttttctgggcgtgtattatcataagaacaataagagctggatggagtccgagtttagagtgtatagctctgcaaataattgtacctttgagtacgtgagccagccctttctgatggacctggagggaaaacaaggaaacttcaaaaacctgagcgaattcgttttcaaaaacatcgacggctatttcaagatctatagcaagcataccccaatcaacctcgtgagggacctcccccagggctttagcgcactggagccactggttgacctgcctatcggcattaatatcacaagatttcagaccctgctggcactgcatagaagctatctgacccctggagactcctctagtgggtggactgccggcgccgctgcctactatgtgggctatctgcagccacggacattcctgctgaaatacaatgagaacgggacaatcacagatgctgttgattgcgcactcgaccccctgtccgagacaaagtgcactctcaagagctttaccgtcgagaagggcatctatcagacctcaaacttcagggtgcagcccacagaatctatcgtgcgcttccctaatatcactaacctgtgtcctttcggtgaagtgttcaacgccaccaggtttgctagcgtgtatgcctggaacaggaagaggatctctaactgcgtcgccgactattccgtgctgtataacagcgcctccttctccacattcaaatgctatggagtgagcccgacaaaactgaacgatctctgctttacaaatgtctacgccgactcttttgtgatcagaggggacgaggtccggcagatcgcaccaggacagacaggcaccattgctgactacaactataagctgcctgacgacttcacaggatgtgtgatcgcatggaactcaaacaatctggactccaaagtcgggggcaactataattacctgtatcgcctgttccggaagtccaacctgaagcccttcgagagggacatcagtacagagatctatcaggctggctccaccccttgcaatggcgtcaagggctttaattgttattttcccctgcagtcttacgggtttcagcctacttacggagttgggtaccagccatacagagtggtcgtgctcagcttcgagctcctgcatgctccagctacagtttgcgggccaaagaagtccactaacctggtgaagaataagtgcgtcaacttcaactttaacgggctcaccggcaccggcgtgctgactgagagcaacaagaagtttctgccatttcaacagtttggacgggacattgccgacaccaccgatgccgttcgggatccacagaccctggaaattctggacattacaccgtgcagcttcgggggcgtgagcgtgatcacacccggaaccaatacaagcaaccaggttgccgtcctgtatcagggcgtcaattgcacagaagtgccagttgctatccacgcagaccagctgactcccacatggcgggtgtatagcaccggatccaacgtgtttcagacccgcgccggatgtctcattggggccgagtacgtgaataacagctacgagtgcgacatccccattggcgccggcatttgtgcgtcttaccagactcagaccaactctcctagaagggccaggtccgttgctagtcagtctattattgcctataccatgagcctcggagctgagaatagcgtggcctactccaataattccatcgcaatccctactaacttcactatttctgtgaccaccgagatcctgcctgtgtctatgactaagactagcgttgattgtaccatgtatatttgtggcgactctaccgaatgttctaacctgctgcttcagtacggctcattttgcacacagctgaacagagccctgactgggatcgctgtggagcaggacaagaacacacaggaggtgtttgcacaggtgaagcagatctataagacccctcctattaaggatttcggcggattcaatttctcacagattctgccagaccccagtaagccttccaagaggagcttcatcgaggatctcctgtttaacaaggtgaccctggcagacgccggctttattaagcaatatggggattgcctgggcgacattgctgccagagacctgatttgcgcccagaaattcaatggcctcacagtgctgccacctctgctgaccgacgagatgatcgctcaatacactagcgcactgctggccggaaccatcacatcaggctggaccttcggggccggagcagcactgcagattccattcgccatgcagatggcctatagattcaacggcattggcgtcacacagaacgtgctgtacgaaaaccagaagctcatcgctaaccagtttaattccgcaattggaaagatccaagattcactcagctcaaccgcctctgcactcggaaagctgcaggacgtggtcaaccagaatgctcaggccctgaacacactcgtcaagcagctgtcctctaactttggcgctatcagctccgttctgaacgacattctgagccgcctggataaggtggaggctgaagtccagattgaccgcctgattaccggccggctgcagtctctgcaaacatacgtgacccagcagctgatcagagcagccgagatccgggcatccgcaaatctggcagcaatcaagatgagcgaatgcgtgctgggccagtccaagcgggtggacttttgtggcaagggctaccacctgatgagcttcccccagagcgccccacatggcgttgtttttctgcacgtgacctatgtccctgctcaggaaaagaactttacaactgctcctgctatctgccatgacggcaaggcccacttcccacgggagggagtgtttgtgtccaatggcacacactggttcgtgacccagaggaacttctatgaaccccagatcatcaccactgacaataccttcgtgtctggaaattgcgacgtcgtgatcggcatcgttaacaacaccgtgtacgaccctctccagccagagctggactcctttaaggaggaactggataagtattttaagaaccacacaagcccagatgtggatctcggggacatctccggaattaacgcctccttcgtgaatatccagaaggagattgaccgcctaaatgaagttgccaagaacctcaatgagtctctgattgatctgcaggaactgggcaagtatgagcagtatatcaaatggccctggtacatttggctggggtttatcgccggactgattgccatcgtcatggtgaccatcatgctgtgttgcatgacctcctgttgttcctgtctgaagggctgctgtagttgcggctcttgctgtaaattcgacgaagatgatagcgagcccgtgctgaagggcgtgaagctgcattatacctga

SEQ ID NO: 169 - protein, 1273 aa, Artificial Sequence
  Synthetic
MFVFLVLLPLVSSQCVNFTNRTQLPSAYTNSFTRGVYYPDKVFRSSVLHSTQDLFLPFFSNVTWFHAIHVSGTNGTKRFDNPVLPFNDGVYFASTEKSNIIRGWIFGTTLDSKTQSLLIVNNATNVVIKVCEFQFCNYPFLGVYYHKNNKSWMESEFRVYSSANNCTFEYVSQPFLMDLEGKQGNFKNLSEFVFKNIDGYFKIYSKHTPINLVRDLPQGFSALEPLVDLPIGINITRFQTLLALHRSYLTPGDSSSGWTAGAAAYYVGYLQPRTFLLKYNENGTITDAVDCALDPLSETKCTLKSFTVEKGIYQTSNFRVQPTESIVRFPNITNLCPFGEVFNATRFASVYAWNRKRISNCVADYSVLYNSASFSTFKCYGVSPTKLNDLCFTNVYADSFVIRGDEVRQIAPGQTGTIADYNYKLPDDFTGCVIAWNSNNLDSKVGGNYNYLYRLFRKSNLKPFERDISTEIYQAGSTPCNGVKGFNCYFPLQSYGFQPTYGVGYQPYRVVVLSFELLHAPATVCGPKKSTNLVKNKCVNFNFNGLTGTGVLTESNKKFLPFQQFGRDIADTTDAVRDPQTLEILDITPCSFGGVSVITPGTNTSNQVAVLYQGVNCTEVPVAIHADQLTPTWRVYSTGSNVFQTRAGCLIGAEYVNNSYECDIPIGAGICASYQTQTNSPRRARSVASQSIIAYTMSLGAENSVAYSNNSIAIPTNFTISVTTEILPVSMTKTSVDCTMYICGDSTECSNLLLQYGSFCTQLNRALTGIAVEQDKNTQEVFAQVKQIYKTPPIKDFGGFNFSQILPDPSKPSKRSFIEDLLFNKVTLADAGFIKQYGDCLGDIAARDLICAQKFNGLTVLPPLLTDEMIAQYTSALLAGTITSGWTFGAGAALQIPFAMQMAYRFNGIGVTQNVLYENQKLIANQFNSAIGKIQDSLSSTASALGKLQDVVNQNAQALNTLVKQLSSNFGAISSVLNDILSRLDKVEAEVQIDRLITGRLQSLQTYVTQQLIRAAEIRASANLAAIKMSECVLGQSKRVDFCGKGYHLMSFPQSAPHGVVFLHVTYVPAQEKNFTTAPAICHDGKAHFPREGVFVSNGTHWFVTQRNFYEPQIITTDNTFVSGNCDVVIGIVNNTVYDPLQPELDSFKEELDKYFKNHTSPDVDLGDISGINASFVNIQKEIDRLNEVAKNLNESLIDLQELGKYEQYIKWPWYIWLGFIAGLIAIVMVTIMLCCMTSCCSCLKGCCSCGSCCKFDEDDSEPVLKGVKLHYT

SEQ ID NO: 170 - DNA, 3822 bp, Artificial Sequence
  Synthetic
atgttcgtcttcctcgtgctgctcccactcgtttcttcccagtgtgtcaactttacaaacaggactcagctgccatccgcctacaccaactccttcaccagaggcgtgtattacccagacaaggtgtttagaagcagcgtgctgcactctacccaggacctctttctgccctttttcagcaacgtgacatggtttcacgcaattcacgtgtccggcactaatggcacaaagcggttcgacaatccagtcctgcctttcaacgatggcgtctactttgcatctactgagaaatccaatatcattaggggatggatcttcggcacaaccctggattctaagacccagagcctgctgatcgtcaacaacgccacaaacgtggtcattaaggtttgcgagtttcagttctgtaactacccttttctgggcgtgtattatcataagaacaataagagctggatggagtccgagtttagagtgtatagctctgcaaataattgtacctttgagtacgtgagccagccctttctgatggacctggagggaaaacaaggaaacttcaaaaacctgagcgaattcgttttcaaaaacatcgacggctatttcaagatctatagcaagcataccccaatcaacctcgtgagggacctcccccagggctttagcgcactggagccactggttgacctgcctatcggcattaatatcacaagatttcagaccctgctggcactgcatagaagctatctgacccctggagactcctctagtgggtggactgccggcgccgctgcctactatgtgggctatctgcagccacggacattcctgctgaaatacaatgagaacgggacaatcacagatgctgttgattgcgcactcgaccccctgtccgagacaaagtgcactctcaagagctttaccgtcgagaagggcatctatcagacctcaaacttcagggtgcagcccacagaatctatcgtgcgcttccctaatatcactaacctgtgtcctttcggtgaagtgttcaacgccaccaggtttgctagcgtgtatgcctggaacaggaagaggatctctaactgcgtcgccgactattccgtgctgtataacagcgcctccttctccacattcaaatgctatggagtgagcccgacaaaactgaacgatctctgctttacaaatgtctacgccgactcttttgtgatcagaggggacgaggtccggcagatcgcaccaggacagacaggcaccattgctgactacaactataagctgcctgacgacttcacaggatgtgtgatcgcatggaactcaaacaatctggactccaaagtcgggggcaactataattacctgtatcgcctgttccggaagtccaacctgaagcccttcgagagggacatcagtacagagatctatcaggctggctccaccccttgcaatggcgtcaagggctttaattgttattttcccctgcagtcttacgggtttcagcctacttacggagttgggtaccagccatacagagtggtcgtgctcagcttcgagctcctgcatgctccagctacagtttgcgggccaaagaagtccactaacctggtgaagaataagtgcgtcaacttcaactttaacgggctcaccggcaccggcgtgctgactgagagcaacaagaagtttctgccatttcaacagtttggacgggacattgccgacaccaccgatgccgttcgggatccacagaccctggaaattctggacattacaccgtgcagcttcgggggcgtgagcgtgatcacacccggaaccaatacaagcaaccaggttgccgtcctgtatcagggcgtcaattgcacagaagtgccagttgctatccacgcagaccagctgactcccacatggcgggtgtatagcaccggatccaacgtgtttcagacccgcgccggatgtctcattggggccgagtacgtgaataacagctacgagtgcgacatccccattggcgccggcatttgtgcgtcttaccagactcagaccaactctcctggctccgcctcttccgttgctagtcagtctattattgcctataccatgagcctcggagctgagaatagcgtggcctactccaataattccatcgcaatccctactaacttcactatttctgtgaccaccgagatcctgcctgtgtctatgactaagactagcgttgattgtaccatgtatatttgtggcgactctaccgaatgttctaacctgctgcttcagtacggctcattttgcacacagctgaacagagccctgactgggatcgctgtggagcaggacaagaacacacaggaggtgtttgcacaggtgaagcagatctataagacccctcctattaaggatttcggcggattcaatttctcacagattctgccagaccccagtaagccttccaagaggagcttcatcgaggatctcctgtttaacaaggtgaccctggcagacgccggctttattaagcaatatggggattgcctgggcgacattgctgccagagacctgatttgcgcccagaaattcaatggcctcacagtgctgccacctctgctgaccgacgagatgatcgctcaatacactagcgcactgctggccggaaccatcacatcaggctggaccttcggggccggagcagcactgcagattccattcgccatgcagatggcctatagattcaacggcattggcgtcacacagaacgtgctgtacgaaaaccagaagctcatcgctaaccagtttaattccgcaattggaaagatccaagattcactcagctcaaccgcctctgcactcggaaagctgcaggacgtggtcaaccagaatgctcaggccctgaacacactcgtcaagcagctgtcctctaactttggcgctatcagctccgttctgaacgacattctgagccgcctggatcccccagaggctgaagtccagattgaccgcctgattaccggccggctgcagtctctgcaaacatacgtgacccagcagctgatcagagcagccgagatccgggcatccgcaaatctggcagcaatcaagatgagcgaatgcgtgctgggccagtccaagcgggtggacttttgtggcaagggctaccacctgatgagcttcccccagagcgccccacatggcgttgtttttctgcacgtgacctatgtccctgctcaggaaaagaactttacaactgctcctgctatctgccatgacggcaaggcccacttcccacgggagggagtgtttgtgtccaatggcacacactggttcgtgacccagaggaacttctatgaaccccagatcatcaccactgacaataccttcgtgtctggaaattgcgacgtcgtgatcggcatcgttaacaacaccgtgtacgaccctctccagccagagctggactcctttaaggaggaactggataagtattttaagaaccacacaagcccagatgtggatctcggggacatctccggaattaacgcctccttcgtgaatatccagaaggagattgaccgcctaaatgaagttgccaagaacctcaatgagtctctgattgatctgcaggaactgggcaagtatgagcagtatatcaaatggccctggtacatttggctggggtttatcgccggactgattgccatcgtcatggtgaccatcatgctgtgttgcatgacctcctgttgttcctgtctgaagggctgctgtagttgcggctcttgctgtaaattcgacgaagatgatagcgagcccgtgctgaagggcgtgaagctgcattatacctga

SEQ ID NO: 171 - protein, 1273 aa, Artificial Sequence
  Synthetic
MFVFLVLLPLVSSQCVNFTNRTQLPSAYTNSFTRGVYYPDKVFRSSVLHSTQDLFLPFFSNVTWFHAIHVSGTNGTKRFDNPVLPFNDGVYFASTEKSNIIRGWIFGTTLDSKTQSLLIVNNATNVVIKVCEFQFCNYPFLGVYYHKNNKSWMESEFRVYSSANNCTFEYVSQPFLMDLEGKQGNFKNLSEFVFKNIDGYFKIYSKHTPINLVRDLPQGFSALEPLVDLPIGINITRFQTLLALHRSYLTPGDSSSGWTAGAAAYYVGYLQPRTFLLKYNENGTITDAVDCALDPLSETKCTLKSFTVEKGIYQTSNFRVQPTESIVRFPNITNLCPFGEVFNATRFASVYAWNRKRISNCVADYSVLYNSASFSTFKCYGVSPTKLNDLCFTNVYADSFVIRGDEVRQIAPGQTGTIADYNYKLPDDFTGCVIAWNSNNLDSKVGGNYNYLYRLFRKSNLKPFERDISTEIYQAGSTPCNGVKGFNCYFPLQSYGFQPTYGVGYQPYRVVVLSFELLHAPATVCGPKKSTNLVKNKCVNFNFNGLTGTGVLTESNKKFLPFQQFGRDIADTTDAVRDPQTLEILDITPCSFGGVSVITPGTNTSNQVAVLYQGVNCTEVPVAIHADQLTPTWRVYSTGSNVFQTRAGCLIGAEYVNNSYECDIPIGAGICASYQTQTNSPGSASSVASQSIIAYTMSLGAENSVAYSNNSIAIPTNFTISVTTEILPVSMTKTSVDCTMYICGDSTECSNLLLQYGSFCTQLNRALTGIAVEQDKNTQEVFAQVKQIYKTPPIKDFGGFNFSQILPDPSKPSKRSFIEDLLFNKVTLADAGFIKQYGDCLGDIAARDLICAQKFNGLTVLPPLLTDEMIAQYTSALLAGTITSGWTFGAGAALQIPFAMQMAYRFNGIGVTQNVLYENQKLIANQFNSAIGKIQDSLSSTASALGKLQDVVNQNAQALNTLVKQLSSNFGAISSVLNDILSRLDPPEAEVQIDRLITGRLQSLQTYVTQQLIRAAEIRASANLAAIKMSECVLGQSKRVDFCGKGYHLMSFPQSAPHGVVFLHVTYVPAQEKNFTTAPAICHDGKAHFPREGVFVSNGTHWFVTQRNFYEPQIITTDNTFVSGNCDVVIGIVNNTVYDPLQPELDSFKEELDKYFKNHTSPDVDLGDISGINASFVNIQKEIDRLNEVAKNLNESLIDLQELGKYEQYIKWPWYIWLGFIAGLIAIVMVTIMLCCMTSCCSCLKGCCSCGSCCKFDEDDSEPVLKGVKLHYT

SEQ ID NO: 172 - RNA, 4058 nt, Artificial Sequence
  Synthetic
ggacagaucgccuggagacgccauccacgcuguuuugaccuccauagaagacaccgggaccgauccagccuccgcggccgggaacggugcauuggaacgcggauuccccgugccaagagugacucaccguccuugacacgauguucgucuuccucgugcugcucccacucguuucuucccagugugucaacuucacaacuaggacucagcugccaccagccuacaccaacuccuucaccagaggcguguauuacccagacaagguguuuagaagcagcgugcugcacucuacccaggaccucuuucugcccuuuuucagcaacgugacaugguuucacgcaauucacguguccggcacuaauggcacaaagcgguucgccaauccaguccugccuuucaacgauggcgucuacuuugcaucuacugagaaauccaauaucauuaggggauggaucuucggcacaacccuggauucuaagacccagagccugcugaucgucaacaacgccacaaacguggucauuaagguuugcgaguuucaguucuguaacgauccuuuucugggcguguauuaucauaagaacaauaagagcuggauggaguccgaguuuagaguguauagcucugcaaauaauuguaccuuugaguacgugagccagcccuuucugauggaccuggagggaaaacaaggaaacuucaaaaaccugcgggaauucguuuucaaaaacaucgacggcuauuucaagaucuauagcaagcauaccccaaucaaccucgugaggggccucccccagggcuuuagcgcacuggagccacugguugaccugccuaucggcauuaauaucacaagauuucagacccugcauagaagcuaucugaccccuggagacuccucuaguggguggacugccggcgccgcugccuacuaugugggcuaucugcagccacggacauuccugcugaaauacaaugagaacgggacaaucacagaugcuguugauugcgcacucgacccccuguccgagacaaagugcacucucaagagcuuuaccgucgagaagggcaucuaucagaccucaaacuucagggugcagcccacagaaucuaucgugcgcuucccuaauaucacuaaccuguguccuuucggugaaguguucaacgccaccagguuugcuagcguguaugccuggaacaggaagaggaucucuaacugcgucgccgacuauuccgugcuguauaacagcgccuccuucuccacauucaaaugcuauggagugagcccgacaaaacugaacgaucucugcuuuacaaaugucuacgccgacucuuuugugaucagaggggacgagguccggcagaucgcaccaggacagacaggcaacauugcugacuacaacuauaagcugccugacgacuucacaggaugugugaucgcauggaacucaaacaaucuggacuccaaagucgggggcaacuauaauuaccuguaucgccuguuccggaaguccaaccugaagcccuucgagagggacaucaguacagagaucuaucaggcuggcuccaccccuugcaauggcgucaagggcuuuaauuguuauuuuccccugcagucuuacggguuucagccuacuuacggaguuggguaccagccauacagaguggucgugcucagcuucgagcuccugcaugcuccagcuacaguuugcgggccaaagaaguccacuaaccuggugaagaauaagugcgucaacuucaacuuuaacgggcucaccggcaccggcgugcugacugagagcaacaagaaguuucugccauuucaacaguuuggacgggacauugccgacaccaccgaugccguucgggauccacagacccuggaaauucuggacauuacaccgugcagcuucgggggcgugagcgugaucacacccggaaccaauacaagcaaccagguugccguccuguaucagggcgucaauugcacagaagugccaguugcuauccacgcagaccagcugacucccacauggcggguguauagcaccggauccaacguguuucagacccgcgccggaugucucauuggggccgagcacgugaauaacagcuacgagugcgacauccccauuggcgccggcauuugugcgucuuaccagacucagaccaacucuccuggcuccgccucuuccguugcuagucagucuauuauugccuauaccaugagccucggaguggagaauagcguggccuacuccaauaauuccaucgcaaucccuacuaacuucacuauuucugugaccaccgagauccugccugugucuaugacuaagacuagcguugauuguaccauguauauuuguggcgacucuaccgaauguucuaaccugcugcuucaguacggcucauuuugcacacagcugaacagagcccugacugggaucgcuguggagcaggacaagaacacacaggagguguuugcacaggugaagcagaucuauaagaccccuccuauuaaggauuucggcggauucaauuucucacagauucugccagaccccaguaagccuuccaagaggagcuucaucgaggaucuccuguuuaacaaggugacccuggcagacgccggcuuuauuaagcaauauggggauugccugggcgacauugcugccagagaccugauuugcgcccagaaauucaauggccucacagugcugccaccucugcugaccgacgagaugaucgcucaauacacuagcgcacugcuggccggaaccaucacaucaggcuggaccuucggggccggagcagcacugcagauuccauucgccaugcagauggccuauagauucaacggcauuggcgucacacagaacgugcuguacgaaaaccagaagcucaucgcuaaccaguuuaauuccgcaauuggaaagauccaagauucacucagcucaaccgccucugcacucggaaagcugcaggacguggucaaccagaaugcucaggcccugaacacacucgucaagcagcuguccucuaacuuuggcgcuaucagcuccguucugaacgacauucugagccgccuggaucccccagaggcugaaguccagauugaccgccugauuaccggccggcugcagucucugcaaacauacgugacccagcagcugaucagagcagccgagauccgggcauccgcaaaucuggcagcaacuaagaugagcgaaugcgugcugggccaguccaagcggguggacuuuuguggcaagggcuaccaccugaugagcuucccccagagcgccccacauggcguuguuuuucugcacgugaccuaugucccugcucaggaaaagaacuuuacaacugcuccugcuaucugccaugacggcaaggcccacuucccacgggagggaguguuuguguccaauggcacacacugguucgugacccagaggaacuucuaugaaccccagaucaucaccacugacaauaccuucgugucuggaaauugcgacgucgugaucggcaucguuaacaacaccguguacgacccucuccagccagagcuggacuccuuuaaggaggaacuggauaaguauuuuaagaaccacacaagcccagauguggaucucggggacaucuccggaauuaacgccuccguggugaauauccagaaggagauugaccgccuaaaugaaguugccaagaaccucaaugagucucugauugaucugcaggaacugggcaaguaugagcaguauaucaaauggcccugguacauuuggcugggguuuaucgccggacugauugccaucgucauggugaccaucaugcuguguugcaugaccuccuguuguuccugucugaagggcugcuguaguugcggcucuugcuguaaauucgacgaagaugauagcgagcccgugcugaagggcgugaagcugcauuauaccugacggguggcaucccugugaccccuccccagugccucuccuggcccuggaaguugccacuccagugcccaccagccuuguccuaauaaaauuaaguugcaucaagcu

SEQ ID NO: 173 - RNA, 3813 nt, Artificial Sequence
  Synthetic
auguucgucuuccucgugcugcucccacucguuucuucccagugugucaacuucacaacuaggacucagcugccaccagccuacaccaacuccuucaccagaggcguguauuacccagacaagguguuuagaagcagcgugcugcacucuacccaggaccucuuucugcccuuuuucagcaacgugacaugguuucacgcaauucacguguccggcacuaauggcacaaagcgguucgccaauccaguccugccuuucaacgauggcgucuacuuugcaucuacugagaaauccaauaucauuaggggauggaucuucggcacaacccuggauucuaagacccagagccugcugaucgucaacaacgccacaaacguggucauuaagguuugcgaguuucaguucuguaacgauccuuuucugggcguguauuaucauaagaacaauaagagcuggauggaguccgaguuuagaguguauagcucugcaaauaauuguaccuuugaguacgugagccagcccuuucugauggaccuggagggaaaacaaggaaacuucaaaaaccugcgggaauucguuuucaaaaacaucgacggcuauuucaagaucuauagcaagcauaccccaaucaaccucgugaggggccucccccagggcuuuagcgcacuggagccacugguugaccugccuaucggcauuaauaucacaagauuucagacccugcauagaagcuaucugaccccuggagacuccucuaguggguggacugccggcgccgcugccuacuaugugggcuaucugcagccacggacauuccugcugaaauacaaugagaacgggacaaucacagaugcuguugauugcgcacucgacccccuguccgagacaaagugcacucucaagagcuuuaccgucgagaagggcaucuaucagaccucaaacuucagggugcagcccacagaaucuaucgugcgcuucccuaauaucacuaaccuguguccuuucggugaaguguucaacgccaccagguuugcuagcguguaugccuggaacaggaagaggaucucuaacugcgucgccgacuauuccgugcuguauaacagcgccuccuucuccacauucaaaugcuauggagugagcccgacaaaacugaacgaucucugcuuuacaaaugucuacgccgacucuuuugugaucagaggggacgagguccggcagaucgcaccaggacagacaggcaacauugcugacuacaacuauaagcugccugacgacuucacaggaugugugaucgcauggaacucaaacaaucuggacuccaaagucgggggcaacuauaauuaccuguaucgccuguuccggaaguccaaccugaagcccuucgagagggacaucaguacagagaucuaucaggcuggcuccaccccuugcaauggcgucaagggcuuuaauuguuauuuuccccugcagucuuacggguuucagccuacuuacggaguuggguaccagccauacagaguggucgugcucagcuucgagcuccugcaugcuccagcuacaguuugcgggccaaagaaguccacuaaccuggugaagaauaagugcgucaacuucaacuuuaacgggcucaccggcaccggcgugcugacugagagcaacaagaaguuucugccauuucaacaguuuggacgggacauugccgacaccaccgaugccguucgggauccacagacccuggaaauucuggacauuacaccgugcagcuucgggggcgugagcgugaucacacccggaaccaauacaagcaaccagguugccguccuguaucagggcgucaauugcacagaagugccaguugcuauccacgcagaccagcugacucccacauggcggguguauagcaccggauccaacguguuucagacccgcgccggaugucucauuggggccgagcacgugaauaacagcuacgagugcgacauccccauuggcgccggcauuugugcgucuuaccagacucagaccaacucuccuggcuccgccucuuccguugcuagucagucuauuauugccuauaccaugagccucggaguggagaauagcguggccuacuccaauaauuccaucgcaaucccuacuaacuucacuauuucugugaccaccgagauccugccugugucuaugacuaagacuagcguugauuguaccauguauauuuguggcgacucuaccgaauguucuaaccugcugcuucaguacggcucauuuugcacacagcugaacagagcccugacugggaucgcuguggagcaggacaagaacacacaggagguguuugcacaggugaagcagaucuauaagaccccuccuauuaaggauuucggcggauucaauuucucacagauucugccagaccccaguaagccuuccaagaggagcuucaucgaggaucuccuguuuaacaaggugacccuggcagacgccggcuuuauuaagcaauauggggauugccugggcgacauugcugccagagaccugauuugcgcccagaaauucaauggccucacagugcugccaccucugcugaccgacgagaugaucgcucaauacacuagcgcacugcuggccggaaccaucacaucaggcuggaccuucggggccggagcagcacugcagauuccauucgccaugcagauggccuauagauucaacggcauuggcgucacacagaacgugcuguacgaaaaccagaagcucaucgcuaaccaguuuaauuccgcaauuggaaagauccaagauucacucagcucaaccgccucugcacucggaaagcugcaggacguggucaaccagaaugcucaggcccugaacacacucgucaagcagcuguccucuaacuuuggcgcuaucagcuccguucugaacgacauucugagccgccuggaucccccagaggcugaaguccagauugaccgccugauuaccggccggcugcagucucugcaaacauacgugacccagcagcugaucagagcagccgagauccgggcauccgcaaaucuggcagcaacuaagaugagcgaaugcgugcugggccaguccaagcggguggacuuuuguggcaagggcuaccaccugaugagcuucccccagagcgccccacauggcguuguuuuucugcacgugaccuaugucccugcucaggaaaagaacuuuacaacugcuccugcuaucugccaugacggcaaggcccacuucccacgggagggaguguuuguguccaauggcacacacugguucgugacccagaggaacuucuaugaaccccagaucaucaccacugacaauaccuucgugucuggaaauugcgacgucgugaucggcaucguuaacaacaccguguacgacccucuccagccagagcuggacuccuuuaaggaggaacuggauaaguauuuuaagaaccacacaagcccagauguggaucucggggacaucuccggaauuaacgccuccguggugaauauccagaaggagauugaccgccuaaaugaaguugccaagaaccucaaugagucucugauugaucugcaggaacugggcaaguaugagcaguauaucaaauggcccugguacauuuggcugggguuuaucgccggacugauugccaucgucauggugaccaucaugcuguguugcaugaccuccuguuguuccugucugaagggcugcuguaguugcggcucuugcuguaaauucgacgaagaugauagcgagcccgugcugaagggcgugaagcugcauuauaccuga
